(19) United States
(12) Patent Application Publication
(10) Pub. No.: US 2021/0254143 A1
(43) Pub. Date: Aug. 19, 2021

(54) RNA Printing and Sequencing Devices, Methods, and Systems

(71) Applicant: The Trustees of Columbia University in the City of New York, New York, NY (US)

(72) Inventors: Peter A. SIMS, Ardsley, NY (US); Sayantan BOSE, Collegeville, PA (US); Jinzhou YUAN, Edgewater, NJ (US)

(73) Assignee: The Trustees of Columbia University in the City of New York, New York, NY (US)

(21) Appl. No.: 16/766,928

(22) PCT Filed: Nov. 27, 2018
(86) PCT No.: PCT/US2018/062650

§ 371 Date: May 26, 2020

Related U.S. Application Data
(60) Provisional application No. 62/590,889, filed on Nov. 27, 2017.

(51) Int. Cl. C12Q 1/6834; B01L 3/00

(52) U.S. Cl. CPC C12Q 1/6834; C12Q 1/6869; B01L 3/5027

(57) ABSTRACT

Described herein are devices, systems, and methods for trapping single-cell lysates in sealed, microwells capable of printing RNA on glass or capturing RNA on beads. These provide efficient, inexpensive manipulation of RNA from individual cells suitable for single-cell transcriptomics on a large scale. Also described are dual barcode capture beads and merged barcode capture beads.

### STATEMENT OF GOVERNMENTAL INTEREST

[0001] This invention was made with government support under Contract Nos. EB016071 and CA202827 awarded by the National Institutes of Health. The government has certain rights in the invention.

### BACKGROUND

[0002] Single cell analysis is important for understanding how cells respond to drugs and other perturbations because phenotypic responses are asynchronous and cells are often both genetically and epigenetically heterogeneous. In the absence of artificial or external perturbations, the natural processes of cellular differentiation during development and malignant transformation in cancer also occur asynchronously and give rise to phenotypic heterogeneity. While single cell RNA-Seq is emerging as a high-dimensional and increasingly scalable tool for assessing phenotypic heterogeneity, many aspects of cellular phenotype cannot be inferred from the transcriptome alone. However, high-content imaging by microscopy could greatly expand the space of observables in a single cell analysis, particularly if it can be integrated with single cell RNA-Seq. High-content imaging assays using optical microscopy provide access to numerous phenotypic observables for cellular metabolism, protein localization, protein synthesis, cell cycle states, and cell signaling all with single cell resolution. However, existing tools for merging single cell imaging and sequencing are expensive, low-throughput, and incompatible with short-term cell culture and stimulation. The instant disclosure addresses this issue by combining a highly scalable microfluidic platform for single cell RNA-Seq and imaging with associated methodologies that allow for the association of sequence barcodes for inexpensive pooled library preparation with optical barcodes in devices described herein.

### SUMMARY

[0003] The disclosure allows for devices, systems, and methods relating to genome-wide profiling of RNA from hundreds to thousands of individual cells in parallel for only a few cents per cell. The devices, systems, and methods described herein address the scalability problem of parallel preparation of low-input single cell libraries for RNA sequencing. Devices, systems, and methods described herein allow for parallel RNA profiling of individual cells in a device that is compatible with short term cell culture, drug stimulation experiments, and high-content fluorescence imaging. In an aspect, this is because the cells are physically segregated into microwells but still in sufficiently close proximity to communicate via diffusible factors.

[0004] In an aspect, the disclosure provides for a device or system comprising
[0005] (a) one or more mRNA capture beads;
[0006] (b) one or more cell-identifying optical barcodes;
[0007] (c) a plurality of chambers, microchambers, or microwells comprising one or more mRNA capture beads and/or one or more cell-identifying optical barcodes; and
[0008] (d) wherein the plurality of chambers, microchambers, or microwells comprising one or more mRNA capture beads and/or one or more cell-identifying optical barcodes are configured for reversible sealing.

[0009] In an aspect, the disclosure provides for a method of drug discovery, drug profiling, and/or drug testing comprising
[0010] (a) combining one or more mRNA capture beads with one or more cell-identifying optical barcodes;
[0011] (b) adding one or more mRNA capture beads with one or more cell-identifying optical barcodes to a plurality of chambers, microchambers, or microwells;
[0012] (c) wherein the plurality of chambers, microchambers, or microwells including one or more mRNA capture beads and one or more cell-identifying barcodes are configured for reversible sealing; and
[0013] (d) adding one or more drugs to the plurality of chambers, microchambers, or microwells configured for reversible sealing; and
[0014] (e) adding one or more cells to the plurality of chambers, microchambers, or microwells that are configured for reversible sealing.

[0015] In an aspect, the one or more optical barcodes include one or more optical barcode sequences. In another aspect, the one or more optical barcodes include one or more fluorescent dyes including different colors and/or intensities.

[0016] The disclosure further provides for method of drug discovery, drug profiling, and/or drug testing described herein comprising (f) adding a buffer to the plurality of chambers, microchambers, or microwells configured for reversible sealing. In an aspect, the buffer includes a lysis buffer.

[0017] The disclosure further provides for a method of drug discovery, drug profiling, and/or drug testing comprising analyzing said cell-identifying optical barcode sequences by fluorescence.

[0018] In another aspect, the device or system of described herein comprise a plurality of chambers, microchambers, or microwells attached to a polysiloxane substrate. In yet another aspect, said polysiloxane substrate comprises polydimethylsiloxane.

[0019] In another aspect, the device or system described herein comprise cell-identifying optical barcode sequences are adapted for fluorescence detection.

[0020] In yet another aspect, the device, system, or methods comprise cells and said cells are not arranged in a droplet configuration.

[0021] In another aspect, the disclosure provides for a method for single cell RNA capture and sequencing, wherein said method comprises
[0022] (a) introducing at least one cell into a microwell, wherein the microwell is attached to a first substrate that faces a second substrate and wherein oligo primers are attached to the surface of said second substrate;
[0023] (b) hybridizing mRNA molecules to the surface of said second substrate;
[0024] (c) adding at least one buffer to the microwell; and
[0025] (d) contacting said first substrate with said second substrate, thereby creating a seal between said first substrate and said second substrate.

[0026] In yet another aspect, the disclosure provides for a device for single cell RNA capture and sequencing, wherein said device comprises a plurality of microwells; wherein said plurality of microwells are attached to a first polysiloxane substrate; a second substrate comprising glass that faces said first substrate, wherein oligo primers are grafted onto to the glass surface of said second substrate.

[0027] The disclosure further provides for a microwell comprising a composition comprising one or more mRNA capture beads; one or more cell-identifying optical barcode sequences; one or more cells, one of more buffers.

[0028] In another aspect, the disclosure provides for a plurality of dual barcode oligonucleotide capture beads, each capture bead comprising a first and a second plurality of oligonucleotide sequences separately attached to an outer surface of the capture bead, wherein the first plurality is an oligonucleotide sequence comprising:
[0029] (a) a PCR handle attached to each capture bead, wherein the PCR handle is identical in each oligonucleotide sequence on each capture bead;
[0030] (b) a first barcode attached to the PCR handle, wherein the first barcode is identical for all oligonucleotide sequences attached to the same capture bead, and wherein the first barcode differs for each capture bead;
[0031] (c) a unique molecular identifier (UMI) of length 6 to 16 nucleotides (nt) attached to the barcode, wherein the UMI may differ between oligonucleotide sequences on the capture bead, wherein the UMI may differ between different capture beads; and
[0032] (d) an oligo(dT) attached to the UMI;

[0033] wherein the second plurality is an oligonucleotide sequence comprising (a), (b), (c), (d) and a second barcode attached to the oligo(dT),

[0034] wherein the second plurality of oligonucleotide sequences represents 0.1% to 10% of attached oligonucleotide sequences.

[0035] In an embodiment, the second barcode is configured to identify a cell associated with the capture bead, and to identify the first barcode. Preferably, the second barcode is configured to be read by fluorescence hybridization.

[0036] In an embodiment of the dual barcode bead, the UMI is of length 6 nucleotides (nt) to 10 nt, or the UMI length may be 6 nt. In an embodiment the second barcode is of length 8 nt to 30 nt, or of length 8 nt to 15 nt, or of length 8 nt. Preferably, the dual barcode capture bead is in the form of a plurality of capture beads.

[0037] In another embodiment, the disclosure provides for a plurality of merged barcode oligonucleotide capture beads, each capture bead comprising a plurality of oligonucleotide sequences separately attached to an outer surface of the capture bead, wherein each oligonucleotide sequence comprises:
[0038] (a) a PCR handle attached to each capture bead, wherein the PCR handle is identical in each oligonucleotide sequence on each capture bead;
[0039] (b) a barcode attached to the PCR handle, wherein the barcode is configured for identification of the attached capture bead and associated cell, wherein the barcode comprises N blocks, wherein each block is an oligonucleotide sequence of length 8 nt to 30 nt chosen from one of N sets of M oligonucleotides, wherein N is at least 2 and M is at least 30;
[0040] (c) a unique molecular identifier (UMI) of length 6 to 16 nucleotides (nt), wherein the UMI is either (i) attached to the barcode or (ii) segments of the UMI appear before or between or after the blocks of oligonucleotides, wherein the UMI may differ between oligonucleotide sequences on the capture bead, and wherein the UMI may differ between different capture beads; and
[0041] (d) an oligo(dT) attached to the UMI.

[0042] The variable N represents the number of blocks and an equivalent number of oligonucleotide sets containing M oligonucleotides. The number N of blocks/sets may be up to 4, 6, 8, 10, or more. A set of M oligonucleotides may have up to 200, 300, 400, or more oligonucleotides. In an embodiment of the merged barcode capture bead, N is 2 and M is 96. In another embodiment, the UMI is of length 6 nt to 10 nt, or the UMI is of length 6 nt. In another embodiment, the identification of the attached capture bead is by on-bead sequential fluorescence hybridization or on-bead sequencing.

[0043] In another embodiment, the disclosure provides for a method for single cell RNA capture and sequencing, wherein the method comprises (a) introducing into a microwell a cell and an oligonucleotide capture bead, wherein the microwell is formed from a first substrate that faces a second substrate; and (b) adding at least one buffer to the microwell. The first substrate and second substrate may be unitary in structure. In an embodiment, the capture beads are dual barcode or merged barcode capture beads. In another embodiment of this method, the first and/or second substrate is a polysiloxane substrate. In another embodiment the first and/or second substrate is polydimethylsiloxane (PDMS). The method may also include another step (e) analyzing the sealed first substrate and second substrate by microscopy or fluorescence, preferably on-bead microscopy or on-bead fluorescence. Preferably, the buffer comprises a lysis buffer.

[0044] In another embodiment, the disclosure provides a device for single cell RNA capture and sequencing, wherein said device comprises (a) a plurality of capture beads, (b) a first substrate comprising a plurality of microwells, and (c) a second substrate that faces said first substrate. In an embodiment of the device, the first and/or second substrates are polysiloxane substrates. In another embodiment, the first and/or second substrates are PDMS substrates. In another embodiment, the capture beads are dual barcode or merged barcode capture beads. In another embodiment of the device, individual capture beads are distributed in individual microwells.

### BRIEF DESCRIPTION OF THE FIGURES

[0045] FIG. 1A provides for fluorescence imaging of a microwell array loaded with optically barcoded beads after introduction and hybridization of a single optical barcode probe. The brighter beads contain optical barcode oligonucleotides that are complimentary to the probe. FIG. 1B provides for a series of 12 fluorescence images from each of two beads in the microwell array device after introduction of each of 12 barcoded probes. When a probe is complimentary to optical barcode oligonucleotides on the bead surface, the bead becomes fluorescent, resulting in the 12-digit binary code that corresponds to a sequence attached to the capture oligonucleotides on the bead.

[0046] FIG. 2A shows schematic and fluorescence imaging data for single cell RNA capture on beads. (FIG. 2A) For mRNA capture on polymer beads, the microwell array is fabricated in a thin PDMS layer on top of a glass slide or coverslip with a microfluidic flow channel above. Cells are first deposited in the microwell array by gravity followed by beads (while circles) covalently functionalized with oligo(dT) primers (orange circular outlines). A lysis buffer is introduced followed by rapid displacement of fluid in the channel with oil, which conformally seals the array. Single cell lysates (green) become trapped in individual microwells and mRNA hybridizes to the oligo(dT) on the beads (red circular outlines). FIG. 2B contains images of single cell RNA capture on beads. The top panel is a bright field/fluorescence overlay of a microwell array in which four microwells contain a bead, but only one contains both a bead and a cell (fluorescently labeled with live stain). The middle panel is a fluorescence image of the array after RNA capture, reverse transcription, and staining with SYTOX Orange. Note that the bead associated with a cell is significantly brighter than the other beads. The bottom panel is a fluorescence image of beads in an array from a negative control experiment involving no RNA or cells, showing that the beads have a certain level of background fluorescence in the presence of stain, which explains the majority of the background signal observed in the beads with no cell in the middle panel.

[0047] FIGS. 3A and 3B provide for combinatorial scheme for synthesis of barcoded capture beads. As illustrated in FIG. 3A, beads are first attached to a set of barcoded oligonucleotides in a multi-well plate, pooled into a single tube, and then re-distributed into a second multi-well plate for combinatorial addition of a second barcode sequence and capture site (oligo(dT)). FIG. 3B provides for detailed molecular biology for solid-phase, combinatorial barcode synthesis. A first barcode sequence is copied onto a dual-biotinylated oligonucleotide containing the T7 promoter sequence and a partial Illumina adapter using DNA polymerase. The resulting double-stranded DNA is conjugated to streptavidin-coated beads, and the non-biotinylated strand is removed. After pooling and expanding the beads, a second reaction is used to add a second barcode sequence and oligo(dT) by priming off of a universal anchor sequence that follows the first barcode.

[0048] FIGS. 4A-4C provide for a schematic and fluorescence imaging data for single cell RNA printing. As shown in FIG. 4A, cells are first deposited in the microwell array by gravity. The glass surface opposite the microwell array is covalently functionalized with oligo(dT) primers for mRNA capture (orange line). The device is then rapidly and conformally sealed against a glass surface in the presence of lysis buffer, flipped over, and held in a sealed position using negative pressure. Single cell lysates (green) become trapped in the sealed microwells, and mRNA hybridizes to the oligo(dT) primers on the glass surface, resulting in single cell mRNA “prints” (red lines). As shown by FIG. 4B an array of single cell mRNA prints on a glass coverslip generated using the device in FIG. 4A and imaged after on-chip reverse transcription. The double-stranded RNA/DNA hybrids are stained with SYTOX Orange, an intercalator dye and imaged on the glass surface. >96% of the prints result from individual cells. Note that the bright spots in the image that are not registered with the array originate from genomic DNA aggregates that were not fully removed by DNase digestion. FIG. 4C shows close-up images of single cell RNA printing. The left-most panel is a bright field image of three cells in individual microwells of the array, the middle panel is a fluorescence image of the corresponding RNA prints on the glass surface after reverse transcription and staining with SYTOX Orange, and the right-most panel is a fluorescence image of the glass surface after RNase digestion, demonstrating that the fluorescent prints originate from captured RNA.

[0049] FIGS. 5A-5C provide for an example flow cell device for single cell RNA-Seq. (A) Graphical representation of our five-lane microwell array flow cell device for single cell RNA-Seq. FIG. 5B shows a schematic of on-chip steps for single cell RNA-Seq. After depositing cells, barcoded capture beads (barcode sequences represented as different colors), and sealing as in FIG. 2A, single cell lysates (green) are trapped in individual microwells and mRNA hybridizes to the barcoded capture beads. The device is unsealed and rapidly washed by flow before on-chip, solid-phase reverse transcription and second-strand synthesis followed by elution and pre-amplification of the pooled library by in vitro transcription. FIG. 5C shows a montage of fluorescence images from part of one lane of the device in FIG. 5A showing beads (red) and cells (blue) loaded in the array. Note that this image was acquired following cell lysis while the device is sealed, and so the blue live stain fills the entire volume of the corresponding microwell and is confined to the microwell by sealing.

[0050] FIGS. 6A and 6B show an analysis of single cell RNA-Seq data. FIG. 6A shows a gene body distribution for uniquely mapped reads showing that we are primarily sequencing the 3′-end of transcripts, as expected. FIG. 6B shows a histogram of the number of genes detected per cell for the 396 single cell profiles used in all subsequent analysis of Experiment 1 and 247 single cell profiles used in all subsequent analysis of Experiment 2.

[0051] FIGS. 7A-7C provide for (FIG. 7A) a comparison of single cell median and population-level RNA-Seq profiles for cells originating from the U87-exclusive lane in Experiment 1. Each data point was obtained by constructing a median profile from a given number of cells and repeating this ten times by random sampling with replacement to obtain a median Pearson correlation coefficient and error bar (SEM). This exercise was repeated for comparison to both the U87 and MCF10a bulk RNA-Seq profiles to demonstrate better concordance between the U87 single cell profiles and the U87 bulk profile. FIG. 7B provides for the same as FIG. 7A, but for single cell profiles in the MCF10a-exlusive lane. As shown in FIG. 7C, differential expression analysis was conducted to obtain cell type-specific gene sets for the U87 and MCF10a cells based on single cell profiles from the pure-cell lanes. Here, we show a histogram of log-ratio of the coefficients of variation (CVs) for the cell type-specific gene sets between the mixed lane profiles and the profiles from the respective pure lanes. As expected, the heterogeneity given by CV is greater for cells in the mixed lanes than in the cell type-exclusive lanes for the cell type-specific genes.

[0052] FIGS. 8A-8C provide for cell type separation by single cell RNA-Seq. FIG. 8A: iPAGE gene ontology/pathway analysis based on rank-ordering of differentially expressed genes using +/−(1−p) where p is the p-value for differential expression between the U87- and MCF10a-exclusive lanes given by the Wilcoxin rank-sum test. Values are positive for genes more highly expressed in U87 and negative for genes more highly expressed in MCF10a. FIG. 8B: t-SNE clustering of 396 single cell profiles based on the differentially expressed genes color-coated by the lane-of-origin of each profile. Two clear spatial clusters form and each is predominantly associated with a specific cell type-exclusive lane. FIG. 8C shows the same t-SNE clustering shown in (FIG. 8B) but color-coated with a score indicating expression of the U87-specific genes vs. the MCF10a-specific genes. The score is based on the relative rank ordering of U87- and MCF10a-specific genes in each cell.

[0053] FIG. 9 provides for a schematic of a reversible PDMS-based device in one aspect of the disclosure.

[0054] FIG. 10 describes ingle Cell RNA-Seq of U87 and MCF10a Cell Lines ˜600 cells paired with beads in five-lane microfluidic device.

[0055] FIG. 11 shows the number of reads associated with each cell-identifying barcode showing a sharp change in slope at ˜350 barcodes, consistent with the ˜350 cell-bead pairs loaded in the microwell array. The remaining cell-identifying barcodes originate either from sequencing error or ambient, background mRNA hybridizing to beads in the device that were not associated with a cell.

[0056] FIG. 12 is a histogram showing that the number of genes detected per individual cell ranges from 1,000 to 17,000 (˜3,400 genes per cell on average).

[0057] FIG. 13A and FIG. 13B describes a representative example of the capabilities described herein for linking high content imaging to single cell sequencing. For example, introducing 4 different at 6 intensities generates 6⁴ or 1296 optical barcodes (FIG. 13A).

[0058] FIGS. 14A and 14B provides for (FIG. 14A) a fluorescence image of beads with different fluorescent colors generated by combinatorial mixing of different fluorescent dyes at different concentrations. Each color combination and intensity represents a different sequence barcode for mRNA capture that is also attached to the bead. In this example the optical barcodes themselves are not sequences. FIG. 14B shows the intensity distribution for the beads in one of the three fluorescence channels demonstrating our ability to separate the optical barcodes based on fluorescence intensity (in this case with five different intensity levels).

[0059] FIG. 15A shows work flow of the synthesis of dual-barcoded mRNA capture beads. FIG. 15B is a schematic illustration of oligo sequence composition on dual-barcoded mRNA capture beads (upper-right). FIG. 15C is a look-up table linking sequencing barcode sequence with optical barcode sequence.

[0060] FIG. 16A shows representative images from optical phenotyping of cells and from optical demultiplexing of beads. FIG. 16B is a histogram of bead intensity after each of the 12 rounds of probe hybridization. FIG. 16C is histogram of optical barcode sequence occurrences.

[0061] FIG. 17A is an illustration of the design of the automated reagent delivery and imaging system for optical demultiplexing. FIG. 17B illustrates optical demultiplexing work flow. Scale bar: 200 μm.

[0062] FIG. 18A is a histogram of the fraction of molecules uniquely aligned to the human transcriptome for a mixed species analysis including human U87 and mouse 3T3 cells. FIG. 18B is a histogram of the number of uniquely aligned molecules per cell. FIG. 18C is a histogram of the genes detected per cell. FIG. 18D is a chart of the number of molecules detected (bottom-left) per cell as a function of the fraction of uniquely aligned reads sampled. FIG. 18E is a chart of the number of genes detected (bottom-right) per cell as a function of the fraction of uniquely aligned reads sampled.

[0063] FIG. 19 shows gel electrophoresis analysis of the bead-free oligo PCR product from a first (left) and second (right) round of bead synthesis reactions.

[0064] FIGS. 20A and 20B show capillary electrophoresis analysis of the gel-purified bead-free oligo PCR product from a first round (FIG. 20A) and a second round (FIG. 20B) of bead synthesis reactions.

[0065] FIGS. 21A and 21B present integrated sequencing and imaging data for a mixed species experiment.

[0066] FIG. 22 illustrates bead design for a merged barcode oligonucleotide, with oligonucleotides attached to optically barcoded mRNA capture beads that enable simultaneous sequencing-based and optical demultiplexing of the same barcode sequence.

[0067] FIG. 23 is a schematic of optical demultiplexing by sequential fluorescence hybridization with combinatorial oligonucleotide pools (M=4, N=3) from merged barcode capture beads.

[0068] FIG. 24 is a fluorescence/bright field overlay image of microwell array filled with optically barcoded mRNA (merged barcode) capture beads during one cycle of optical demultiplexing, wherein as expected roughly half of the beads are highly fluorescent (bright state).

[0069] FIG. 25 is a length distribution of cDNA obtained using conventional RNA-seq beads and SCOPE-SeqV2 (merged barcode) beads measured on a high sensitivity bioanalyzer chip, showing almost identical results for the conventional RNA-seq and SCOPE-SeqV2 beads.

[0070] FIG. 26 is a color image produced by merging the monochrome images of the same field of view in bright field, Cy3, and Cy5 channels.

[0071] FIG. 27 is a scatter plot of the log 2 transformed mean intensities of individual beads in the Cy3 and Cy5 channels.

### DETAILED DESCRIPTION

[0072] In an aspect, the disclosure provides for a microwell array system, devices, and methods for pairing individual cells with mRNA capture beads. In another aspect, the disclosure provides for a microwell array system, device, and methods for pairing individual cells with mRNA capture beads that introduce, cell-identifying barcode sequences into cDNA generated after mRNA capture. In an aspect, the system is compatible with high-content cellular imaging and drug stimulation experiments.

[0073] The disclosure further provides for capture beads, for example mRNA capture beads, or probes comprising one or more optical barcodes described herein. In an aspect, the capture beads, for example mRNA capture beads, or probes are used to identify drug and/or to be used in drug simulation experiments.

[0074] In an aspect, the disclosure provides for devices, systems, and/or methods wherein cells are arranged in a grid and/or a chamber. In yet another aspect, the disclosure provides for devices, systems, and/or methods wherein cells are arranged in a grid and/or chamber as compared to devices, systems, and/or methods wherein cells are arranged in droplets or a configuration where cells are physically segregated from one another. In an aspect, a microfluidic device, system, or method described herein comprises a flow cell with an array of microwells embedded in either the top or bottom of the device. In another aspect, the device described herein is a solid state device that allows for single cell isolation, imaging, and/or uniform parallel introduction of reagents to a plurality of cells.

[0075] The disclosure provides for devices, systems, and/or methods wherein cells are arranged in a reversible chamber or microchamber wherein the chamber and/or microchamber can be open and/or closed. The disclosure also provides for devices, systems, and/or methods wherein cells are arranged in reversible chamber or microchamber where the chamber and/or microchamber can be opened or closed as compared to devices, systems, and/or methods wherein cells are arranged in non-reversible droplets or a non-reversible configuration wherein cells are physically segregated from one another. In such a non-reversible configuration, the droplets and/non-reversible configuration wherein cells are physically segregated cannot be readily toggled back and forth, that is, may not be opened or closed. As a result, in a non-reversible configuration, fluidics cannot be uniformly distributed to the cells and then uniformly removed and replaced by a second fluid.

[0076] The disclosure further provides for devices or system comprising
[0077] (a) one or more capture beads, for example mRNA capture beads;
[0078] (b) one or more cell-identifying barcode sequences, for example, optical barcode sequences;
[0079] (c) a plurality of chambers or microchambers including one or more mRNA capture beads and/or one or more cell-identifying barcode sequences;
[0080] (d) wherein the plurality of chambers or microchambers including one or more mRNA capture beads and/or one or more cell-identifying barcode sequences are reversible and are capable of being opened or closed more than a single time.

[0081] In an aspect, the disclosure provides for devices or system comprising
[0082] (a) one or more mRNA capture beads;
[0083] (b) one or more cell-identifying barcode sequences;
[0084] (c) a plurality of chambers or microchambers including one or more mRNA capture beads and/or one or more cell-identifying barcode sequences;
[0085] (d) wherein the plurality of chambers or microchambers including one or more mRNA capture beads and/or one or more cell-identifying barcode sequences are reversible and are capable of being opened or closed more than a single time; and
[0086] (e) wherein the device or system does not comprise a droplet microfluidics device or does not include droplet microfluidic technology, nonoliter droplet technology, and/or droplet sequence, “Drop-seq,” “Drop-seq single cell analysis” technology, and/or technology wherein cells are captured in “droplets.”

[0087] The disclosure further provides for probes comprising one or more mRNA capture beads and one or more cell-identifying barcode sequences associated or coupled with the one or more mRNA capture beads.

[0088] The disclosure further provides for compositions comprising one or more mRNA capture beads and one or more cell-identifying barcode sequences associated or coupled with the one or more mRNA capture beads and one or more cells.

[0089] The disclosure further provides for methods of drug discovery, drug profiling, and/or drug testing comprising
[0090] (a) combining one or more mRNA capture beads with one or more cell-identifying barcode sequences;
[0091] (b) adding one or more mRNA capture beads with one or more cell-identifying barcode sequences to a plurality of chambers or microchambers;
[0092] (c) wherein the plurality of chambers or microchambers including one or more mRNA capture beads and one or more cell-identifying barcode sequences are reversible; and
[0093] (d) adding one or more drugs to the reversible chambers or reversible microchambers.

[0094] The disclosure further provides for a probe comprising
[0095] (a) one or more mRNA capture beads;
[0096] (b) one or more cell-identifying barcode sequences, for example, optical barcode sequences;
[0097] (c) a plurality of chambers or microchambers including one or more mRNA capture beads and/or one or more cell-identifying barcode sequences;
[0098] (d) wherein the plurality of chambers or microchambers including one or more mRNA capture beads and/or one or more cell-identifying barcode sequences are reversible and are capable of being opened or closed more than a single time

[0099] The disclosure further provides for methods for single cell RNA capture and sequencing, wherein said method comprises
[0100] (a) introducing at least one cell into a microwell, wherein the microwell is attached to a first substrate that faces a second substrate and wherein oligo primers are attached to the surface of said second substrate;
[0101] (b) hybridizing mRNA molecules to the surface of said second substrate;
[0102] (c) adding at least one buffer to the microwell;
[0103] (d) contacting said first substrate with said second substrate, thereby creating a seal between said first substrate and said second substrate.

[0104] In an aspect, the device, system, and/or microarray is imaged using fluorescence.

[0105] In another aspect, the disclosure provides for a device for single cell RNA capture and sequencing, wherein said device comprises a plurality of microwells; wherein said plurality of microwells are attached to a first polysiloxane substrate; a second substrate comprising glass that faces said first substrate, wherein oligo primers are grafted onto to the glass surface of said second substrate.

[0106] In an aspect, the substrate or surface comprises a polysiloxane substrate. In an aspect, the polysiloxane substrate comprises PDMS. In another aspect, the substrate comprises polymethylmethyacrylate (PMMA). In another aspect, the substrate comprises a thermoplastic for fabrication by, for example, hot embossing. In another aspect, the substrate comprises glass for fabrication by, for example laser machining. In another aspect, the substrate comprises silicon or silicon-on-glass or photoresist-on-silicon.

[0107] In another aspect, a system or device described herein further comprises one or more drugs, buffers, active agents, and/or a plurality of cells.

[0108] In an aspect, the disclosure provides for devices, systems, methods, and/or probes capable of profiling hundreds or thousands of cells from an organ or tumor. In an aspect, the cells analyzed are healthy human cells, abnormal cells, cancer cells, neural cells, immune cells, epithelial cells, mesenchymal cells, or stem cells. Cells could also originate from microorganisms including parasites, fungi, or bacteria. Other units containing nucleic acids such as viruses both in isolation or inside of an infected host cell could be analyzed.

[0109] In yet another aspect, different drugs or chemical constituents or compositions, for example, lysis buffer, may be introduced to a device or system described herein, for example, in a chamber or microchamber, at any time given the reversible nature of the chambers or microchambers. This provides for additional flexibility and advantages over other devices or systems, such as those employing, for example, droplet microfluidic technology, nanoliter droplet technology, and/or droplet sequence, “Drop-seq,” “Drop-seq single cell analysis” technology, and/or technology where cells are captured in “droplets.”

[0110] In an aspect, the device or system described herein, for example, the microfluidic device does not involve any on-chip valves and/or moving parts, which can result in a high feature density. In another aspect, the device or system described herein is not a droplet microfluidics device or does not include droplet microfluidic technology, nonoliter droplet technology, and/or droplet sequence, “Drop-seq,” “Drop-seq single cell analysis” technology, and/or technology where cells are captured in “droplets.” In an aspect, the device or system described herein is more compatible with cell culture and cell perturbation assays than a droplet microfluidic device because fluids can be readily exchanged in a uniform fashion and cells can communicate with each other via diffusible factors. Hence, cell viability will be higher and cells will exhibit normal physiology in comparison to cells that are sequestered in droplets. In another aspect, in the device or system described herein, cell are arranged in regular array and are in contact with a flat, optically transparent surface as opposed to a droplet microfluidic device in which cells are isolated inside of a spherical enclosure. Therefore, in yet another aspect, the device or system described herein is intrinsically more compatible with imaging, for example optical imaging or microscopy, than droplet devices.

[0111] In an aspect, devices, systems, and methods described herein have a higher throughput than devices, systems, or methods employing droplet microfluidic technology, nonoliter droplet technology, and/or droplet sequence, “Drop-seq,” “Drop-seq single cell analysis” technology, and/or technology where cells are captured in “droplets.” In yet another aspect, analysis of cells, probes, and beads using devices, systems, and methods described herein have a throughput that is 5, 10, 15, 20, 25, or 100 or more times less expensive than devices, systems, or methods employing droplet microfluidic technology, nonoliter droplet technology, and/or droplet sequence, “Drop-seq,” “Drop-seq single cell analysis” technology, and/or technology were cells are captured in “droplets.”

[0112] In another aspect, the device described herein is compatible with automation, for example, a computer-controlled system that is capable of facilitating automated introduction of any of various fluids to the device, temperature control, and reversible sealing of the microwells. Accordingly, in a preferred aspect the device described herein can capture mRNA from thousands of individual cells in parallel and produce pooled, single cell RNA-Seq libraries for ˜0.10/cell.

[0113] In an aspect, barcoded capture beads are introduced to the microwell array in either a random process or ordered process. In yet another aspect, barcoded capture beads are introduced into the microwell array in a random process with little or no control over which barcoded capture bead enter each microwell. Under such a scenario, in an aspect, imaging information acquired from the cells in the device is not directly associated with the single cell transcriptomes that ultimately are quantified by deep sequencing. In an aspect, this issue is addressed by introducing barcodes, for example, optical barcodes, to the mRNA capture beads that indicate the sequence barcode attached to each bead. In another aspect, the optical barcodes can be read out using the same or different fluorescence microscope used for live cell imaging on the device. In yet another aspect, the disclosure provides for a reagent that allows for the capture RNA from individual cells, allows for association of a unique sequence barcode with each single cell cDNA library, and/or reveals the identity of the attached sequence barcode by optical methods.

[0114] In an aspect, the disclosure provides for an optical barcode and associated methods described herein. In an aspect, the optical barcode is a sequence. In another aspect, the optical barcode is not a sequence. In another aspect, optical barcodes described herein are not DNA sequences.

[0115] In an aspect, an optical barcode described herein comprises a combination of fluorescent dyes comprising at least one different color and optionally more than one different intensity that make the bead uniquely identifiable on an optical microscope. In another aspect, an optical barcode described herein comprises a combination of fluorescent dyes comprising two, three, four, five or more different colors and optionally more than one different intensity that make a respective bead uniquely identifiable on an optical microscope.

[0116] The disclosure further provides for proteomic methods and systems utilizing a device, probe, or bead described herein. In an aspect, an oligonucleotide-based optical barcode is loaded onto beads that also harbor reactive groups for capturing protein (e g amine-, carboxyl-, or thiol-reactive groups). In yet another aspect, optical barcodes are loaded onto beads along with one or more antibodies capable of capturing specific proteins. Proteins can be quantified by fluorescence methods (e.g. fluorescently labeled antibodies) or mass spectrometry. In a further aspect, the disclosure provides for the use of DNA-labeled antibodies that are amplified, identified, and quantified by deep sequencing.

[0117] The devices, systems, and methods described herein provide for key distinctions and advantages over other devices, systems, and methods. For example, the microwell array device is constructed in such a way that it can be reversibly sealed during cell lysis and RNA capture. Significant loss of RNA occurs in our arrays when cells are lysed in unsealed or even imperfectly sealed arrays due to rapid diffusion of RNA molecules. In the context of the bead capture and RNA-Seq experiments, this could result not only in reduced RNA capture, but also significant cross-talk. Herein, advantage is taken of the physical properties of PDMS, namely its flexibility and hydrophobicity, for high-fidelity, reversible sealing which is difficult to achieve using the agarose hydrogel device reported previously. In addition, the devices, systems, and methods described herein demonstrate genome-wide single cell RNA-Seq. Additionally, the single cell capture and pooled library preparation scheme described herein costs $0.10-$0.20/cell even at a relatively modest scale of several hundred cells per run (see, for example, Table 7), compared to the <$1/cell estimated at the 10,000-cell scale for alternative approach, for example, one described in Fan H C, Fu G K, Fodor S P A: Combinatorial labeling of single cells for gene expression cytometry. Science 2015, 347:628-636, which is herein incorporated by reference in its entirety.

[0118] In an aspect, the disclosure provides for optical demultiplexing or optical barcoding of sequence-barcoded capture beads by, for example, attaching a unique combination of short oligonucleotides to each bead. In an aspect, while the sequence barcode associated with the RNA capture primer can be read out by DNA sequencing, the optical barcode can be read out on a standard fluorescence microscope. In another aspect, the oligonucleotide combination is unique to each sequence barcode and can be identified by hybridizing fluorescently labeled complementary oligonucleotides to beads. The presence or absence of a series of fluorescently labeled oligonucleotides on each bead after hybridization indicates the unique combination of short oligonucleotides attached to each bead and therefore the sequence barcode attached to each bead. Once the sequence barcode attached to each bead is identified, single cell transcriptome captured on each bead can be identified and read out using a sequencer with phenotypic information obtained from imaging the cells associated with each bead in each microwell of our device.

[0119] In an aspect, optical barcoding technology described herein is combined with applications beyond single cell RNA-Seq. In an aspect, an extension of the invention is bulk RNA-Seq or RNA-Seq of small numbers of cells. These can be seeded in the microwells or propagated from a single cell seeded in each microwell. The disclosure further provides for single cell DNA-Seq. The disclosure further provides for barcoded capture oligonucleotides that contain oligo(dT) for capturing mRNA from individual eukaryotic cells. Alternatively, the beads are functionalized with primers that are specific to targeted DNA loci or RNA transcripts. In yet another aspect, the beads are functionalized with primers that have a random sequence and can therefore capture any DNA or RNA sequence from an individual cell. In an aspect, in each case, a corresponding optical barcode is used to link imaging data acquired for a target cell or group of cells and sequencing data acquired from whatever nucleic acids are captured on the bead.

[0120] The disclosure further provides for proteomic methods and systems utilizing a device described herein. In an aspect, an oligonucleotide-based optical barcode is loaded onto beads that also harbor reactive groups for capturing protein (e g amine-, carboxyl-, or thiol-reactive groups). In yet another aspect, optical barcodes are loaded onto beads along with one or more antibodies capable of capturing specific proteins. Proteins can be quantified by fluorescence methods (e.g. fluorescently labeled antibodies) or mass spectrometry. In a further aspect, the disclosure provides for the use of DNA-labeled antibodies that are amplified, identified, and quantified by deep sequencing.

[0121] Single cell analysis is important for understanding how cells respond to drugs and other perturbations because phenotypic responses are inherently asynchronous.

### PDMS Microwell Flow Cell for Single Cell Transcriptome Capture

[0122] In an aspect, the microfluidic platform described herein comprises a flow cell with an array of microwells embedded in either the top or bottom of the device. In an aspect, the device or system described herein comprises a high-throughput DNA sequencing and digital PCR device, as described in, for example, White A K, Vanlnsberghe M, Petriv O I, Hamidi M, Sikorski D, Marra M A, Piret J, Aparicio S, Hansen C L: High-throughput microfluidic single-cell RT-qPCR. Proceedings of the National Academy of Sciences of the U.S. Pat. No. 2,011,108(34):13999-14004 or Men Y, Fu Y, Chen Z, Sims P A, Greenleaf W J, Huang Y: Digital polymerase chain reaction in an array of femtoliter polydimethylsiloxane microreactors. Anal Chem 2012, 84(10):4262-4266, the contents of which are incorporated by reference herein in their entirety.

[0123] In an aspect, fluids can be driven through the flow cell manually by, for example, laminar flow using a syringe or pipette. Fluid exchange in the microwells occurs by diffusion, while cells and beads can be loaded by gravity. The microwell arrays may be fabricated from, a polysiloxane substrate, for example, polydimethylsiloxane (PDMS), a silicone rubber commonly used in soft lithography. PDMS allows inexpensive, rapid, and repeatable fabrication from molds produced on silicon in photoresist using standard photolithography. See, for example, McDonald J C, Whitesides G M: Poly(dimethylsiloxane) as a material for fabricating microfluidic devices. Accounts of chemical research 2002, 35(7):491-499 and First Single Cell Expression Analysis with PDMS, Marcus et al., Analytical Chemistry, 2006. (Quake Lab), which are herein incorporated by reference in their entirety. In addition, the material properties of PDMS, including its hydrophobicity and flexibility, facilitate reversible sealing of the microwells against a flat surface using mechanical deformation and negative pressure (see, for example, FIG. 2A) or introduction of oil by laminar flow (See, for example, FIG. 3A).

[0124] In an aspect, the device or system described herein is capable of solid-phase capture of RNA from individual cells via two modes of operation-RNA “printing” on glass and RNA capture on beads. For example, in an aspect, in RNA printing mode, individual cells are loaded in the microwells, which are fabricated in a PDMS slab that faces a glass coverslip. Oligo(dT) primers are covalently grafted to the glass surface so that mature mRNA molecules can be immobilized by hybridization of their poly(A) tails. Following the introduction of lysis buffer, the microwells can be sealed by mechanically placing them in conformal contact with the functionalized glass surface. Cell lysis releases mRNA into the solution confined by the microwells, resulting in hybridization to the oligo(dT)-coated glass coverslip. By placing the flow channel under negative pressure, the seal can be maintained in the absence of mechanical force, making the device transportable and readily accessible to an optical microscope. See, for example, White A K, Vanlnsberghe M, Petriv O I, Hamidi M, Sikorski D, Marra M A, Piret J, Aparicio S, Hansen C L: High-throughput microfluidic single-cell RT-qPCR. Proceedings of the National Academy of Sciences of the United States of America 2011, 108(34):13999-14004, which is herein incorporated by reference in its entirety.

[0125] Because the mRNA is immobilized on a glass surface, enzymatic processing steps can take place on-chip, simply by sequential flow of reagents through the device. After incubating the trapped, single cell lysates with the glass capture surface, the seal may be released and the flow cell can be rinsed with a detergent-containing buffer followed by a reaction mixture containing DNase. Because the oligo(dT) primers are comprised of locked nucleic acid (LNA), they are resistant to nuclease digestion. See, for example, Koshkin A A, Nielsen P, Meldgaard M, Rajwanshi V K, Singh S K, Wengel J: LNA (locked nucleic acid): an RNA mimic forming exceedingly stable LNA: LNA duplexes. Journal of the American Chemical Society 1998, 120(50):13252-13253, the content of which is incorporated by reference in its entirety.

[0126] The immobilized single cell mRNA libraries can then be reverse transcribed in parallel, and the resulting mRNA/cDNA hybrids can be visualized by fluorescence microscopy after staining with a fluorogenic intercalator dye. For example, FIG. 4B illustrates a fluorescence image of single cell transcriptome “prints” arrayed on a glass coverslip as described above. Here, it is further confirmed by running a control experiment that the printed material originates from RNA. While some aggregates of genomic DNA were not fully digested (but are reduced in intensity by DNase treatment), the disclosure further confirms that the vast majority of material imaged in the circular prints originates from RNA. For example, the left-most panel of FIG. 4C shows a bright field image of a microwell array in which three microwells each contain an individual cell. The resulting RNA prints (middle panel) that can be visualized after reverse transcription are ablated by incubating the surface with RNaseH (right-most panel), which selectively digests RNA in RNA/DNA hybrids. Conversion of RNA/DNA hybrids to single-stranded cDNA precludes detection using the intercalator dye, and so removal of RNA from the prints eliminates the fluorescence signal almost completely. FIG. 4C also contains some small fluorescent objects associated with the interstitial walls of the microwell array or with microwells that did not contain a cell. These are substantially reduced in intensity by RNase treatment, confirming that they are, in fact, RNA that is spuriously captured or non-specifically absorbed. These objects could arise due to contamination from dead cells or other sources of freely floating RNA introduced with the cells prior to sealing. Nonetheless, the vast majority of the observed signal in FIG. 4C is associated with the circular mRNA prints that correlate perfectly with microwells that initially contained a cell.

[0127] FIG. 4A shows a second, very similar version of the device where the microwells are fabricated in PDMS on a glass slide, and the sealing is accomplished by laminar flow of oil. Using nearly the same procedures as described above for RNA printing mode, we use this version of the device to capture RNA on beads. After introducing cells, we can load beads into the microwells by gravity and achieve super-Poisson loading by using beads with a mean diameter greater than the radius of the microwells. Like the glass surface in FIG. 4A, we coat the beads in oligo(dT) to facilitate mRNA capture after cell lysis and sealing. FIG. 2B shows bright field and fluorescence images of a bead-containing microwell array loaded with individual cells following solid-phase mRNA capture and reverse transcription. The bead contained in a microwell that also contains a cell is substantially more fluorescent following reverse transcription than the other beads. While there is some fluorescence signal associated with beads that do not contain a cell, this is mainly due to non-specific staining of the high-density of single-stranded primers on the bead surface and non-specific staining of the bead itself, as shown in the third panel of FIG. 2B where we depict fluorescence images of beads in the absence of cells, cell lysate, or RNA as a negative control.

### A Scalable Platform for Single Cell RNA-Seq

[0128] A scalable platform for single cell RNA-Seq based on the bead capture modality is described herein. The low reagent volumes required for microfluidic processing result in a significant cost reduction relative to some conventional methods, for example, as described in Wu A R, Neff N F, Kalisky T, Dalerba P, Treutlein B, Rothenberg M E, Mburu F M, Mantalas G L, Sim S, Clarke M F et al: Quantitative assessment of single-cell RNA-sequencing methods. Nat Methods 2014, 11(1):41-46, which is herein incorporated by reference in its entirety.

[0129] A further reduction in cost can be realized by, for example, using microfluidics in combination with schemes for cDNA barcoding. A representative example of this, such as the CEL-Seq strategy, can be found in Hashimshony T, Wagner F, Sher N, Yanai I: CEL-Seq: single-cell RNA-Seq by multiplexed linear amplification. Cell Rep 2012, 2(3):666-673, which is herein incorporated by reference in its entirety. By introducing a cell-specific barcode to the cDNA during reverse transcription, all subsequent sequencing library preparation steps can be accomplished on pooled cDNA from multiple cells, further reducing hands-on time and reagent consumption.

[0130] A pool of mRNA capture beads was generated in which each bead is attached to ˜1 billion copies of a primer terminated on the 3′-end with one of 960 possible barcode sequences followed by oligo(dT) using a combinatorial synthesis technique (FIGS. 3A and 3B). If, for example, 100 cells loaded into the microwells of a device or system described herein receive a random barcoded bead from the pool, it is expected that the mRNA from ˜95 of them would be uniquely labeled based on the binomial distribution. A copy of the T7 promoter sequence (TPS) and part of an Illumina sequencing adapter (ISA) comprise the 5′-end of the capture primer (Table 1) to allow linear pre-amplification by in vitro transcription (IVT) and library enrichment by PCR (FIG. 3B). To create this large pool of barcoded beads, 96 different barcode-containing oligonucleotides (Table 2) were copies onto a dual-biotinylated oligonucleotide containing TPS and ISA by primer extension with DNA polymerase in a 96-well plate. Each barcode is terminated with a universal, 6-base anchor sequence that becomes the 3′-end of the biotinylated oligonucleotide after the first round of primer extension (FIG. 3B). After this first reaction, each barcoded oligonucleotide was immobilized onto a set of streptavidin-coated Sepharose beads, quench the reaction, combine all of the barcoded beads in a pool, and remove original barcode-containing strand by denaturation. At this point, the pool of beads is split into ten new reactions and each containing one of ten unique second barcodes along with poly(dT) (Table 3) are added to the 3′-end of the immobilized oligonucleotide by primer extension from the universal anchor sequence (FIG. 3B). After quenching this reaction, the beads can be pooled, removing the unbiotinylated strands, and washed. The resulting pool of beads contains 960 barcoded capture primers.

[0131] A PDMS microwell device containing five flow channel lanes for physical multiplexing of samples and >10,000 microwells was constructed (FIG. 5A). The cylindrical microwells are about 50 μm in diameter and height with a volume of <100 pL. In another aspect, the microwells are about 100 μm to about 5 mm, about 5 μm to about 200 μm, about 10 μm to about 100 μm, about 25 μm to about 75 μm, about 30 μm to about 600 μm in diameter and height. In yet another aspect, the microwells comprise a volume of about 10 pL to about pL, about 10 pL to about 100 pL, about 25 pL to about 75 pL, about 25 pL to about 100 pL. In an aspect, cells are loaded in individual microwells randomly, according to Poisson statistics, such that the majority of cell-containing wells contain one cell. The concentration of the cellular suspension can be tuned in order to avoid overloading the microwell array. For example, if ˜100 cells are captured in every 1,000 microwells of a given array, then about <5% of microwells will contain more than one cell. Beads can then be loaded into the wells at a somewhat higher density because the mean diameter of the beads (˜30 μm) significantly reduces the probability double-loading (FIG. 5B and FIG. 5C). In an aspect, depending on the size of the microwell, it is rare to observe both beads and cells in an overloaded microwell. Given the pool of 960 cell-identifying barcodes and five lanes, the capacity of the system described herein for single cell RNA-Seq is ˜600 cells at a unique barcoding rate of >94%. In another aspect, the capacity of the system described herein for single cell RNA-Seq is ˜600 cells at a unique barcoding rate of about greater than 85%, greater than 90%, greater than 91%, greater than 92%, greater than 93%, greater than 94%, greater than 95% or more. In an aspect, the device or systems described herein may be scaled to increase capacity by synthesizing additional barcodes and/or adding microwells to the device or system.

[0132] After loading the cells and barcoded beads, procedures described above and herein can be employed to trap single cell lysates in sealed microwells, immobilizing captured mRNA on beads, and reverse transcribe (FIG. 5B). Following on-chip second-strand synthesis, the pool of single cell libraries can be simultaneously elute and pre-amplify overnight by IVT using T7 RNA polymerase (FIB. 5B). The resulting amplified RNA (aRNA) can be removed from each lane using a pipette, reverse transcribe the aRNA from each lane with primers containing lane-identifying barcodes, the cDNA libraries from all five lanes can be pooled, and enrichment of the sequencing library in a single PCR reaction can be undertaken. The primers used for aRNA reverse transcription contain 8-base unique molecular identifiers (UMIs) so that the vast majority of cDNA molecules are distinguishable. That way, genes can be quantified from sequencing data based on the number of UMIs associated with each gene rather than the number of reads, mitigating noise and bias that result from exponential amplification by PCR. See, for example, Shiroguchi K, Jia T Z, Sims P A, Xie X S: Digital RNA sequencing minimizes sequence-dependent bias and amplification noise with optimized single-molecule barcodes. Proceedings of the National Academy of Sciences 2012, 109(4):1347-1352 and Shiroguchi K, Jia T Z, Sims P A, Xie X S: Digital RNA sequencing minimizes sequence-dependent bias and amplification noise with optimized single-molecule barcodes. Proceedings of the National Academy of Sciences 2012, 109(4):1347-1352, which are incorporated by reference in their entirety.

### Demonstration and Analysis of Highly Multiplexed Single Cell RNA-Seq

[0133] In an aspect, the microfluidic device described herein is used to obtain RNA-Seq profiles from ˜600 cells across five lanes from two commonly used human cancer cell lines (described herein as “Experiment 1” throughout the text). One of the five lanes contained U87 human glioma cells, one contained MCF10a human breast cancer cells, and the other three contained a mixture of both cell lines. These two cell lines are highly mesenchymal, have been cultured for numerous passages, and have relatively similar expression profiles. Nonetheless, they are distinguishable by a few key genes and can be readily separated the data set. In addition, in an aspect, a slightly different protocol with less expensive reagents are used to obtain profiles of ˜500 cells across five lanes for a different cell pair (U87 cells and the diploid cell line WI-38, which has not undergone malignant transformation) in Experiment 2.

[0134] A factor with any pooled library scheme is cross-talk between cell-identifying barcodes. As described herein, this issue is addressed by quantitative analysis of Experiment 1. For example, the disclosure provides for methodology wherein cross-talk is quantified by using both sequencing and imaging data. In an aspect, because the device or system described herein is compatible with fluorescence microscopy, a fraction of the streptavidin molecules on each bead can be labelled with red-fluorescent AlexaFluor 647 and pre-stained the cells with a blue-excitable live stain. This allows quantification of the number of cells paired with a barcoded capture bead and also allows for the estimation of the number of barcodes that are expected to be observed in the sequencing data for each lane. The sequencing data reveals that more barcodes are present in the library for each lane than expected based on the imaging data. Analysis reveals that the number of molecules associated with a given barcode placed the barcodes in two distinct populations. The size of the population of barcodes associated with a larger number of molecules was highly consistent with the imaging data (within ˜8%), which we take to demarcate our single cell RNA-Seq profiles. The second, larger population of barcodes with relatively few associated molecules likely results from multiple potential sources including sequencing error, actual cross-talk or spurious capture within our microfluidic device, and PCR jumping as observed in other implementations of multiplex single cell RNA-Seq. Across all five lanes the cell-identifying barcodes that were not associated with actual cells in the device had 200-300× fewer molecules per barcode than those associated with cells (based on the ratio of median unique molecules in the two populations).

[0135] As described in FIGS. 6A and 6B, the systems and devices described herein produce useful single cell RNA-Seq profiles. For example, in an aspect, the library preparation protocol described herein is based on CEL-Seq where, rather than sequencing the full gene body and normalizing by transcript length, the 3′-end of transcripts are sequenced and counted. FIGS. 6A and 6B show the expected distribution of mapping positions for 3′-end sequencing, with most reads mapping to the 3′-UTRs or coding sequences. Subsequent analysis to demonstrate cell type separation using our data set will rely on the 396 single cell profiles that we obtained with the highest coverage. Although 635 genes on average were detected across all cell profiled in Experiment 1, an average of 876 genes from the top 396 cells were detected (FIG. 6B). Hence, the 204 cells that we discard from subsequent analysis have an average of ˜170 genes detected per cell. Similarly, for Experiment 2, an average of 1,030 genes from the top 247 single cell profiles were detected, but ˜530 genes on average across all cells.

[0136] To assess the similarity of our single cell expression profiles to conventional, population-level RNA-Seq, the Pearson correlation between bulk RNA-Seq and single-cell medians constructed from different numbers of individual cells after normalizing by the total number of molecules detected in each cell were calculated (FIG. 7A and FIG. 7B). An analysis on single cell profiles originating from the U87-exclusive and MCF10a-exclusive lanes in Experiment 1 was conducted, randomly sampling the complete sets of profiles ten times without replacement for each point in the curves shown in FIG. 7A and FIG. 7B. This analysis shows that the single cell medians constructed from U87 single cell profiles correlate better with the bulk U87 RNA-Seq profile than with the bulk MCF10a RNA-Seq profile (FIG. 7A), and vice-versa (FIG. 7B). It also shows that the single cell median correlations saturate around r=0.55-0.60 depending on the cell type. As a point of comparison, an analysis for CEL-Seq and DR-Seq gave population-level Pearson correlations of 0.71 and 0.69, respectively. See, for example, Dey S S, Kester L, Spanjaard B, Bienko M, van Oudenaarden A: Integrated genome and transcriptome sequencing of the same cell. Nat Biotechnol 2015, 33(3):285-289, which is herein incorporated by reference in its entirety.

[0137] To further demonstrate the robustness of our data set, classifier for U87 and MCF10a cells in Experiment 1 were built. Single cell profiles from lanes that contained either exclusively U87 cells of MCF10a cells were used to identify 189 differentially expressed genes (p<0.05, Wilcoxin rank-sum test). FIG. 7C shows the log-ratio of the coefficients of variation (CVs) for each of these two genes sets between the mixed lane profiles and the profiles from the respective pure lanes. The log-ratio of CVs is greater than zero (CV ratio greater than one) for 92% of U87-specific genes and 85% of MCF10a-specific genes.

[0138] FIG. 8A shows a pathway analysis of gene ontologies enriched across >11,600 genes that were both detected across our 396 single cell profiles and available in the iPAGE database and ranked based on differential expression in Experiment 1. See, for example, Goodarzi H, Elemento O, Tavazoie S: Revealing global regulatory perturbations across human cancers. Mol Cell 2009, 36(5):900-911, which is herein incorporated by reference in its entirety. A matrix of Spearman correlation coefficients across our 396 profiles based on rank-ordering the 189 differentially expressed genes in each cell was then generated. The data was clustered spatially using the t-stochastic neighborhood embedding (t-SNE) algorithm, described for example in Van der Maaten L, Hinton G: Visualizing data using t-SNE. Journal of Machine Learning Research 2008, 9(2579-2605):85, a clustering algorithm applied to high-dimensional single cell analysis data (FIG. 8B and FIG. 8C). This t-SNE result contains two closely associated clusters of individual cells. To understand the origin of these two clusters, the t-SNE clustering with two different color-schemes are displayed. In FIG. 8B, it is shown how single cell profiles from the various lanes of a device described herein are distributed. One of the two clusters contains all of the cells from the MCF10a-exclusive lane, while the other contains nearly all of the cells from the U87 lane with a few exceptions. Single cell profiles from the mixed lanes are distributed throughout the two clusters. While the single cell profiles from mixed lanes are distributed uniformly throughout the MFC10a cluster, there is some separation between a subset of mixed lane profiles and the U87-exclusive lane profiles in the U87 cluster. In FIG. 8C, the same clustering result with a different color scheme that indicates the relative rank ordering of the U87 vs. MCF10a gene sets in each profile is described. This metric associates the cells in each of the two clusters with the expected cell type-specific expression pattern.

[0139] In an aspect, the microfluidic platforms described throughout are compatible with transcriptome-wide analysis of individual cells by RNA-Seq. In an another aspect, either could be combined with a sequence-based barcoding scheme to generate a pooled cDNA library from hundreds or thousands of individual cells. For example, in the bead capture device, barcoding is not strictly necessary because physical means could be used to extract the beads from the microwells for downstream processing with conventional labware. Alternatively, fluorescently labeled oligonucleotide probes could be used to image captured RNA molecules similar to RNA-FISH. Probes could be introduced sequentially, imaged, and removed in cycles or combined with previously reported multiplexing schemes. Similarly, sequential rounds of qRT-PCR in sealed microwells could allow targeted detection of specific genes or mutations in captured RNA.

Synthesis of Dual-Barcoded mRNA Capture Beads

[0140] In another aspect, dual-barcoded mRNA capture beads were synthesized by the work flow shown in FIG. 15A. Sequence-barcoded mRNA capture beads (MACOSKO-2011-10, ChemGenes) are thoroughly washed with water to remove free-floating oligonucleotides and then immediately evenly distributed into 64 wells on a 96 well plate. The 96 well plate is then sealed, vortexed, and sonicated. In doing so, a small amount of sequence-barcoded mRNA capture oligonucleotides fall off from the beads (bead-free DNA) and get released into the liquid phase. The supernatant from each well (contains bead-free DNA) are collected into separate tubes, converted into double stranded DNA, PCR amplified and indexed, pooled, gel purified, and sequenced (bead-free DNA sequencing data). A unique combination of short oligonucleotides selected from a first set of 6 types of short oligonucleotides and ligation reaction mixture are sequentially added into each of the 64 wells. This results in the attachment of a unique and known combination of oligonucleotides to the beads in each well (FIG. 15B). The sequencing barcode sequence of beads in each well can be obtained from the bead-free DNA sequencing data. Thus, a two-column look-up table (FIG. 15C) is generated where each row represents a bead, one column contains sequencing barcode sequence, and the other column contains a 6-digit optical barcode sequence. The beads are then pooled together and subjected to a second round of split-and-pool synthesis with a different set of 6 types of short oligonucleotides. This generates another two-column look-up table. Each bead appears once in each of the two look-up tables and has a 12-digit binary optical barcode sequence. A total of 4096 types of optically barcoded beads are made. To prevent these newly ligated oligonucleotides from interfering the single-cell RNA-seq library prep steps, a polyethylene glycol (PEG) chain is inserted in the short oligonucleotide.

[0141] It was initially attempted to optically barcode the beads spectrally (i.e., labeling the beads with varying amount of dyes with different emission wavelength). The challenge of this approach is that the emission wavelength of commercially available dyes is rather broad. Only a few distinct dyes can fit on the full spectrum of light thus limiting the barcoding capacity. We then tried to barcoding beads with a combination of short oligonucleotides with different sequences. Attachment methods involving use of DNA polymerase may not work.

### Demultiplexing Work Flow

[0142] 12 rounds of sequential fluorescent in situ hybridization (FISH) were used to read out the 12-digit binary optical barcode sequence. Each round of FISH has four major steps including background scan, probe hybridization (150 nM probes), probe scan, and probe stripping (150 mM NaOH). Here the probes used in each round are fluorophore-labeled short oligonucleotides whose sequences are complementary to each of the 12 short oligonucleotides that was ligated to the beads during bead synthesis step. During each FISH round, two populations of beads were detected in terms of fluorescent intensity in the fluorophore channel. Beads in the population that has a higher and lower intensity are assigned a binary sequence of 1 and 0 respectively. After the full 12 rounds of FISH, a 12-digit binary optical sequence is generated for each bead. FIG. 16A shows representative images from optical phenotyping of cells and from optical demultiplexing of beads. FIG. 16B is a histogram of bead intensity after each of the 12 rounds of probe hybridization. FIG. 16C is histogram of optical barcode sequence occurrences.

### Instrumentation for Automated Optical Demultiplexing

[0143] An automated reagent delivery and scanning system (FIG. 17A) was built for automated on-chip optical demultiplexing (FIG. 17B). The design is illustrated in FIG. 17A. In the automated reagent delivery system, fixed positive pressure was used to drive fluid flow, multichannel rotary selector valves located at the upstream of the microwell array device were used to toggle between different reagent channels, and a solenoid valve located at the downstream of the microwell array device was used to control the on/off of the reagent flow. The microwell array device is thus constantly being pressurized during incubation steps which help prevent the device from drying and suppress bubble formation. A microfluidic flow cell which traps bubbles came from upstream is connected in-serial immediate upstream of the microwell array device to further prevent bubbles from entering the microwell array device. A water hammer arrestor consists of a half-filled cryotube was connected immediate downstream of the microwell array device and upstream of the on-off flow switch valve to buffer the hydraulic shock produced by the on-off switch valve which can cause bead loss. The automated scanning system consists of laser light source, motorized stage, shuttle, and filter wheel, an inverted microscope, and a camera. An optically transparent mechanical support (glass slide) was attached to the bottom surface of the microwell array device to prevent sagging which facilitates imaging Both the reagent delivery system and the scanning system are controlled by a C++ program.

### Full Single-Cell RNA Sequencing and Imaging Workflow

[0144] An an embodiment, full single-cell RNA sequencing and imaging work flow may be as follows. A microwell array device is filled and flushed with TB S buffer. Single-cell suspension is then loaded into the device. The device is scanned under a microscope to obtain imaging phenotype and location of each individual cell in the device. Optically barcoded mRNA capture beads are then loaded into the device. Lysis buffer and oil are flowed into the device sequentially to trigger cell lysis and physically isolate the microwells from each other allowing mRNA from cells in different microwells to be captured by their respective co-localized beads. After the mRNA capture step, captured mRNA molecules are reverse transcribed which coverts mRNA into double-stranded DNA-RNA duplex resulting in the barcoding of cDNA. Any unused single-stranded capture primers on bead surface are removed by exonuclease I digestion. The device is then subject to twelve rounds of sequential FISH to read out the optical barcode sequence of each bead and their locations in the device. So far, all the reactions including cell lysis, mRNA capture, reverse transcription, exonuclease I digestion, and optical demultiplexing are performed on the device which allows the linking between each cell's imaging phenotype and optical barcode sequence of the bead that resides in the same well with the cell. After the optical demultiplexing step, all beads are extracted from the device. Tube-based PCR reactions are used to pre-amplify bead-bound cDNA molecules. In the case where the number of cells in the device is greater than the optical barcoding capacity enabled by the current 4096 unique optical sequences, the microwell array is cut into multiple pieces before the beads were extracted and processed in separate tubes in parallel. Each piece contains a number of cells within the optical barcoding capacity of the current 4096 unique optical sequences. By doing so, the optical barcoding capacity gains a n fold increase where n is the number of pieces the full device is cut into. The amplified cDNA copies are released into the liquid phase and further amplified into sequencing library and sequenced by commercially-available kit (Nextera X T, Illumina) and sequencers (NextSeq, Illumina). The raw fastq files generated by sequencers are processed to generate a digital expression matrix where each column represents the expression profile of a cell and each row represents the expression level of a gene. The look-up table generated in the bead synthesis step are then used to further link each cell's imaging phenotype to sequencing barcode sequence of the bead that resided in the same well with the cell and the associated mRNA expression profile.

### Mixed Species

[0145] Performance of the technique was evaluated by an experiment using two cell lines of distinct species (human U87 and mouse 3T3). Each of the two cell lines were stained with a dye with different emission wavelength. The two cell lines were then mixed in approximately equal proportion and loaded into a microwell array device followed by the full work flow described above. The imaging phenotypes obtained in this experiment include live stain intensity, cell size and morphology.

### Sequencing Data Quality

[0146] FIGS. 18A-E show sequencing data quality based on two major metrics for single-cell sequencing data quality: purity and molecular capture efficiency. In the mixed species experiment on human U87 and mouse 3T3, an average purity of 98% was observed, and an average molecular capture efficiency of 2452 genes/6224 molecules was detected per cell.

### Linking Accuracy

[0147] Since the two cell lines are from different species (human and mouse) that have different genomes, the species identity of each cell was determined based on the genome that majority of its mRNA molecules was mapped to. In addition, cells from different species were live stained with different dyes. Therefore, the species identity of each cell was independently determined based on the imaging data. The linking accuracy is defined as the percentage of cells having consistent species calls based on both sequencing and imaging data. A linking accuracy of 90% was demonstrated in this initial proof-of-concept experiment.

### Single-Stranded Ligation and Detached Oligonucleotides

[0148] Optically barcoded mRNA capture beads are generated by modifying sequence barcoded mRNA capture beads. These beads contain oligonucleotides with a universal primer sequence on the 5′-end, barcode sequences in the middle, and oligo(dT) on the 3′-end for mRNA capture. DNA-replicating enzymes, such as DNA polymerase, are used to attach the optical barcode oligonucleotides to the 3′-end of a subset of mRNA capture oligos on the beads. In addition, DNA-replicating enzymes, such as DNA polymerase, are used to generate sequencing libraries for identifying the barcode sequences attached to each bead. Exposure of the mRNA capture beads to enzymes that replicate DNA in a template-directed fashion prior to conducting single-cell RNA-Seq may be disadvantageous. This may be due to these enzymes causing mRNA capture oligonucleotides and optical barcode oligonucleotides to serve as primers and templates for each other, generating “primer-dimers” on the surface of the beads. This may reduce the concentration of mRNA capture oligonucleotides on the bead that is available for hybridization to mRNA and cDNA synthesis in single-cell RNA-Seq.

[0149] In an aspect, the potential problems noted above may be resolved by avoiding exposure of the beads to DNA-replicating enzymes when modifying the oligonucleotides on the bead and generating sequencing libraries for identifying the barcode sequences on each bead. In this aspect, a single-stranded ligation reaction facilitated by a DNA ligase, rather than primer extension facilitated by DNA polymerase is used to attach the optical barcode oligonucleotides to a subset of mRNA capture oligonucleotides on the bead.

[0150] In an aspect, sequencing libraries containing the barcode sequences of each bead are generated by taking advantage of the fact that a small number of oligonucleotides detach from the beads at a slow rate, making them available in solution. By allowing this to occur and isolating these detached oligonucleotides from the supernatant of the beads, a sequencing library using DNA polymerase can be generated, but without exposing the beads directly to this enzyme.

[0151] Single-stranded ligation and use of detached oligonucleotides permit synthesis of optically barcoded mRNA capture beads, decoding of the barcode sequences, and efficient single-cell RNA-Seq using those beads.

[0152] The challenge noted above could be applicable to other areas. While the mRNA capture beads modified with optical barcode sequences, it may be desireable to modify the mRNA capture beads for applications such as targeted capture of specific gene sequences. For example, one could envision modifying a subset of oligonucleotides on the mRNA capture beads using the methods described above to facilitate targeted enrichment of a specific gene sequence from individual cells while still allowing unbiased profiling of the mRNA from those cells using the remaining oligo(dT) capture sequence. Specific cases include targeted enrichment of the T cell receptor repertoire or antibody repertoire from immune populations with simultaneous, unbiased mRNA profiling of the same individual cells.

### Kits

[0153] In another aspect, the disclosure provides for a kit comprising, consisting essentially of, or consisting of any of probes, beads, and regents disclosed herein. In an aspect, the kit includes any of the combination of probes, beads, and regents disclosed in the Figures herein. In another aspect, the kit provides for probes, beads, and regents applied in a manner that is consistent with the methodology of the examples and figures. In another aspect, the kit provides instructions or guidance regarding the use of the compositions, probes, devices, systems or methods described herein.

[0154] In an aspect, the kit includes instructions describing the methodology described herein.

[0155] The following examples serve to illustrate certain aspects of the disclosure and are not intended to limit the disclosure.

### EXAMPLES

[0156] The invention is illustrated herein by the experiments described by the following examples, which should not be construed as limiting. The contents of all references, pending patent applications and published patents, cited throughout this application are hereby expressly incorporated by reference. Those skilled in the art will understand that this invention may be embodied in many different forms and should not be construed as limited to the embodiments set forth herein. Rather, these embodiments are provided so that this disclosure will fully convey the invention to those skilled in the art. Many modifications and other embodiments of the invention will come to mind in one skilled in the art to which this invention pertains having the benefit of the teachings presented in the foregoing description. Although specific terms are employed, they are used as in the art unless otherwise indicated.

### Example 1

### Generation of Optically Barcoded mRNA Capture Beads for Optical Demultiplexing by Multi-Color Fluorescence Imaging for Single Cell RNA-Seq

[0157] N-succinimide-coated Sepharose beads with a mean diameter of ˜30 μm were obtained from GE Healthcare in isopropanol. The beads were washed three times with water by centrifugation and split into 125 different tubes. The beads were then re-suspended in a reaction mixture with a final concentration of 100 mM sodium borate (pH 8.5) along with three differently-labeled streptavidin proteins (streptavidin-AlexaFluor 488, streptavidin-AlexaFluor 546, and Streptavidin-AlexaFluor 647 from Life Technologies). For each of the 125 reaction mixtures, the three proteins were added at one of 5 concentrations such that each of the 125 reaction mixtures had one of 5\hat{ }3=125 unique combinations of labels and label intensities. The reaction was incubated at room temperature for one hour on a rotisserie to allow the labeled streptavidins to covalently react with the beads, form amide bonds. The beads were then washed five times in 50 mM Tris-HCl pH 8, 50 mM NaCl, and 0.1% Tween-20 before using to completely quench any remaining reactive groups on the beads. Each of the 125 uniquely labeled sets of beads were then incubated with a uniquely barcoded, 5′-biotinylated oligonucleotide. The oligonucleotides had a universal adapter sequence on the 5′-end to facilitate amplification, a barcode sequence, and oligo(dT) on the 3′-end to facilitate mRNA capture. The oligonucleotides became bound to the beads through the biotin-streptavidin interaction, resulting in beads that could be identified by fluorescence microscopy based on their unique configuration of fluorescent labels to harbor a specific nucleic acid barcode sequence.

### Generation of Optically Barcoded mRNA Capture Beads for Optical Demultiplexing by Sequential Fluorescence Hybridization for Single Cell RNA-Seq

[0158] 2.4 million beads aminated polystyrene beads (Custom Primer Support 200 Amino, GE) were reacted with an 8% solution of glutaraldehyde in Cyanoborohydride Coupling Buffer (Sigma) for six hours a room temperature. After washing the beads in phosphate buffered saline (PBS), the beads were divided evenly into each of 32 tubes. To each tube, 62.5 pmol of a unique 5′-aminated oligonucleotide were added containing an adapter sequence, a unique capture barcode sequence, and a linker sequence. In addition, zero or more 5′-aminated oligonucleotides were added from a set of five, each of which contains a unique optical barcode sequence and a linker sequence. The constellation of oligonucleotides on the bead surface forms a binary code. For example, if there are five oligonucleotides in a set, and the first, third, and fourth oligonucleotides are present on the bead, then the code could be in an aspect, 10110. However, there will also be a bead in the set with the code 00000, where none of the oligonucleotides are present. This also provides a signal, a bead that does not fluoresce when exposed to any of the probes

[0159] 2.5 pmol of each optical barcode oligonucleotide was further added. Each capture barcode sequence is associated with a unique set of optical barcode sequences. In this embodiment, there are 32 capture barcode sequences and 2⁵=32 possible combinations of optical barcode configurations added in the first round of synthesis. The 5′-aminated oligonucleotides were reacted with the aldehyde-conjugated beads in Cyanoborohydride Coupling buffer for 12 hours at room temperature. The reaction was then quenched by the reaction by adding 1 M Tris-HCl to each well. The beads were then washed in PBS.

[0160] In a second barcode synthesis, the 32 reactions from the first round were pooled and then re-distributed into each of 128 tubes. To each tube, 150 pmol of a unique oligonucleotide was added containing a linker sequence complementary to that in the capture barcode oligonucleotides already attached to the beads, a second capture barcode sequence, a random sequence (for unique molecular identification), and a poly(A) sequence. In addition, zero or more oligonucleotides from a set of seven were added, each of which contains a unique optical barcode sequence and a linker sequence complementary to that in the optical barcode oligonucleotides already attached to the beads. 20 pmol of each optical barcode oligonucleotide. Each capture barcode sequence is associated with a unique set of optical barcode sequences. There are 128 capture barcode sequences and 2⁷=128 possible combinations of optical barcode configurations added in the second round of synthesis. In combination with the first round of synthesis, the second round of synthesis results in a set of 32×128=4,096 uniquely barcoded beads with both unique capture and optical barcodes attached. The second round oligonucleotides was hybridized to the oligonucleotides attached in the first round in Buffer 2 (New England BioLabs) with 1% tween-20 (Sigma) at 50 C for 20 minutes and at room temperature for 12 hours. The beads were then washed and then copied the second round oligonucleotides onto the 3′-end of the first round oligonucleotides by primer extension with Klenow Large Fragment DNA Polymerase (New England BioLabs) at room temperature for 2 hours. The primer extension reaction was quenched with EDTA followed by sodium hydroxide. The beads from all 128 reactions were then pooled and washed them extensively in sodium hydroxide and Wash Buffer (10 mM Tris pH 8, 1 mM EDTA, 0.01% tween-20).

### Fabrication of a PDMS Microwell Array Device

[0161] Microfabricated arrays of cylindrical pillars in photoresist on a silicon wafer were obtained from FlowJEM. The pillars were 50 microns in diameter and 50 microns tall. A second wafer contained a relief pattern of a flow channel A 1:10 mixture of liquid polydimethylsiloxane (PDMS) base and curing agent (Sylgard 184, Dow-Corning) was poured on each wafer. A glass microscope slide was pressed onto the uncured liquid PDMS that had been poured on the wafer containing cylindrical pillars, forming a thin layer of PDMS between the wafer and the glass slide. Both wafers with liquid PDMS were then placed in an oven to cure at 90° C. overnight. The cured, solidified PDMS were then peeled from both wafers resulting in a thin microwell array on the glass slide and a PDMS flow channel After using a punch to insert inlet and outlet holes on either end of the flow channel, air plasma was used to bond the flow channel over the microwell array. The resulting microwell array flow cell device was then used for single cell RNA-Seq and optical demultiplexing.

### Single Cell RNA-Seq Library Generation in a Microwell Array Device Using In Vitro Transcription

[0162] Prior to the experiment, the device was flushed with 0.1% Tween-20 and incubated for several hours to hydrate the microwells, which were subsequently washed with PBS. Cell suspensions were counted using the Countess automated cell counter (Life Technologies). A suspension of cells in PBS mixed with Calcein AM (live stain) was flowed into the device and incubated for five minutes. Cells were deposited in the microwells by gravity. After thoroughly removing any excess cells with PBS, a suspension of barcoded capture beads that had been pre-counted by microscopy was introduced in PBS and allowed to load under gravity for five minutes. Excess beads were thoroughly removed with PBS and the flow cell was incubated on ice. A lysis buffer containing 0.08% Triton X-100 supplemented with SUPERaseIN (Life Technologies) was flowed under ice-cold conditions immediately followed by fluorinert oil (Sigma) to seal the device. After two cycles of freeze-thaw at −80 C to enhance cell lysis, the device was incubated at room temperature for 60 minutes for mRNA capture. After one hour of incubation for mRNA capture, the device was unsealed by rapid removal of the fluorinert oil with 20 mM Tris-HCl pH 8 containing 1% Triton X-100 and SUPERaseIN followed by thorough washing of the device with 20 mM Tris-HCl pH 8, 50 mM NaCl, and 0.1% Tween-20.

[0163] The mRNA captured on the beads was reverse transcribed using ProtoScript II Reverse Transcriptase (New England BioLabs) for two hours at 42 C in 1× ProtoScript Reverse Transcriptase Buffer supplemented with 10 mM DTT, 0.5 mM dNTPs, 0.1% Tween-20, and SUPERaseIN. The reaction mixture was then removed with 20 mM Tris-HCl pH 8, 50 mM NaCl, and 0.1% Tween-20. Second strand synthesis was carried out using the MessageAmp II aRNA amplification kit (Ambion) according to the manufacturer's instructions. This involves a reaction mixture with DNA polymerase and RNaseH that is incubated for two hours at 16 C. After removing the second strand reaction mixture with 20 mM Tris-HCl pH 8, 50 mM NaCl, and 0.1% Tween-20, in vitro transcription (IVT) was carried out using reagents in the MessageAmp II aRNA amplification kit (Ambion) including T7 RNA polymerase according to the manufacturer's instructions for 13 hours at 37 C. The reaction linearly amplified the double-stranded cDNA libraries on the beads, eluting pools of barcoded aRNA into the flow channel which was subsequently removed using a pipette and purified using an RNA Clean & Concentrator Column (Zymo). aRNA was then reverse transcribed using uniquely barcoded random hexamer primers using PrimeScript Reverse Transcriptase (Clontech) supplemented with 0.5 mM dNTPs, 10 mM DTT, 1× PrimeScript Buffer, and 0.1 U/uL SUPERaseIN. The reaction proceeded for 10 minutes at 25° C. and two hours at 42° C. The RNA-cDNA hybrid product was purified twice using 0.65× Ampure XP beads (Beckman). The resulting cDNA libraries were then enriched by PCR using Phusion High Fidelity DNA polymerase (New England BioLabs) using the Illumina RP1 and RPI primers. The resulting PCR product was then purified on a 1.5% agarose gel, extracted using a Gel Extraction Kit (Qiagen), purified using 0.65× Ampure XP beads (Beckman), and sequenced on a NextSeq 500 sequencer (Illumina).

### Single Cell RNA-Seq Library Generation in a Microwell Array Device Using Template-Switching

[0164] Cells and mRNA capture beads were loaded into the microwell array device as described above. The device was then placed on a computerized temperature and fluidic control system for automated single cell library production. The system consists of a manually controlled pressurization system, software, an electronic six-port rotary selector valve (Rheodyne), and a thermoelectric heater-cooler module (TE Technology). After cooling the system to 4 C, a lysis solution comprised of TCL Buffer (Qiagen) and 1% 2-mercaptoethanol was introduced to the device, which was rapidly and automatically sealed with fluorinert (Sigma). After removing the oil and unsealing the microwells, a reverse transcription reaction mixture comprised of 1× Maxima RT Buffer, 1 mM dNTPs, 1 U/uL SUPERaseIN, 2.5 uM template-switching oligonucleotide, 0.1% Tween-20, and 10 U/uL Maxima H-Reverse Transcriptase (ThermoFisher) was introduced and incubated for 30 minutes at room temperature followed by 90 minutes at 42 C.

[0165] After removing the reverse transcription reaction mixture, the beads were removed from the microwells by sonication, concentrated by centrifugation and incubated for 30 minutes at 37 C with Exonuclease I in 1× Exonuclease I Buffer (New England BioLabs). The beads were then washed in 10 mM Tris-HCl pH 8, 1 mM EDTA, and 0.5% sodium dodecyl sulfate (SDS) followed by 10 mM Tris-HCl pH 8, 1 mM EDTA, and 0.01% Tween-20. The beads were then re-suspended in a PCR reaction mixture containing 1×HiFi Hot Start Ready Mix (Kappa) and 1 uM PCR primer and thermocycled to amplify a full-length, double-stranded, pooled cDNA library. The PCR product was purified with 0.6× Ampure XP beads (Beckman). The library was then fragmented and a sequencing adapter introduced using the Nextera XT library preparation kit (Illumina) according to the manufacturer's instructions. Finally, the sequencing library was enriched by PCR using a reverse PCR primer from the Nextera XT kit and a custom forward PCR primer along with amplification reagents from the Nextera XT kit used according to the manufacturer's instructions. The resulting PCR product was purified with 0.6× Ampure XP beads (Beckman) and sequenced on a NextSeq 500 sequencer (Illumina).

Optical Demultiplexing of Barcoded mRNA Capture Beads

[0166] Following cDNA synthesis on the surface of optically barcoded capture beads, the microwell array device was transferred to an epifluorescence microscope system. The microscope system contains an inverted microscope frame (Ti—U, Nikon), an electron-multiplied charge coupled device (EM-CCD) camera (iXon, Andor), a 20×0.75 NA air objective lens (Nikon), a three-axis motorized stage (ASI), a 140 mW 637 nm optically pumped semiconductor laser (OBIS, Coherent), and custom optics for coupling the laser beam into the microscope. The custom optical path includes an engineered diffusor (Thorlabs) and electronic phase scrambling device for flattening the illumination field. An automated, computer-controlled fluidics system is attached the microscope system and contains two, ten-channel rotary selector valves (Rheodyne). A single computer program controls the fluidics system, laser shutter, camera, and microscope stage. Each of twelve, Cy5-labeled optical barcode probes was loaded into the channels of the fluidics system. The optical barcode probes were each complementary to one of the optical barcode oligonucleotides attached the beads as described above. In addition, a wash buffer (20 mM Tris-HCl pH 8, 50 mM NaCl, and 0.1% Tween-20) and a denaturing solution (100 mM NaOH) were loaded into independent channels of the fluidics system. The first of twelve optical barcode probes was flowed into the flow cell, incubated at room temperature for ten minutes, and washed out with wash buffer. After washing, the microscope automatically scanned and imaged the entire microwell array and identifies the beads in each microwell that are fluorescently labeled with the first optical barcode probe by hybridization, indicating the presence of the first optical barcode sequence. The denaturing solution was then introduced to the flow cell which causes the first optical barcode probe to dissociate from the beads and exit the flow cell. After washing with wash buffer, the process was repeated for all of the remaining optical barcode probes. At conclusion, the configuration of optical barcode sequences attached to each bead can be inferred from the series of twelve fluorescence images. Because each unique configuration of optical barcode sequences corresponds to a specific capture barcode sequence associated with the cDNA that is also attached to each bead, the capture barcode sequence for each individual cell can be identified (see, for example, FIG. 1A and FIG. 1B). This allows a direct association between imaging information acquired from the cells, the capture barcode associated with the cDNA of the at cell that is read out on the sequencer, and therefore the transcriptome of that cell all through identification of the corresponding optical barcode.

### Example 2

### Fabrication PDMS Microwell Arrays for Single Cell RNA Printing

[0167] Silicon wafer masters (˜4 in) with cylindrical pillars (diameter 50 micron; height 30 micron) for photolithography were obtained from Stanford Microfluidics Foundry and were subsequently exposed to 1H,1H,2H,2H-perfluorooctyltrichlorosilane (Alfa Aesar) vapor under vacuum for ˜30 minutes to avoid curing of the PDMS on the wafer. PDMS (Sylgard 184, Dow Corning) was thoroughly mixed 10:1 (base: curing agent) and degassed under house vacuum for 2 hours. ˜15 g of degassed PDMS was poured onto the 4 in silicon wafer master and allowed to cure overnight at ˜90° C. This slab with microwells was then gently peeled off from the master and used to construct PDMS microreactor flow cells.

### Surface Chemistry on Glass Coverslip

[0168] VistaVision Microscope cover glass (22×50×0.16 mm) was plasma sterilized (Harrick Plasma) for ˜5 mins, and immediately immersed in 10% acetic acid (pH 3.5) ethanol solution containing 0.5% trimethoxysilanealdehyde (United Chemical Technologies), and incubated for 15 mins. The cover glass was then washed with ethanol, air-dried and heat cured at 90° C. for 10 mins A 2.5 μM solution of 5′-aminated-LNA-oligo(dT) (Exiqon) in cyanoborohyride coupling buffer (Sigma) supplemented with 1M NaCl was added on the aldehyde surface of the cover glass. The cover glass was incubated for 3 hours at room temperature inside a humid chamber, and then washed with DI water. The aldehyde surface was then incubated in 10% ethanolamine in cyanoborohydride coupling buffer for 30 mins to quench the unreacted aldehydes.

### Construction of the Flowcell

[0169] A rectangular slab (3.5×1.5×0.1 cm) of PDMS containing the microwell array in the center was cut and a double-sided adhesive tape (˜120 micron thickness, Grace BioLabs) was adhered to the flat side of the PDMS slab that contained the microwells. The tape was cut in an elongated hexagonal shape, which formed the microchannel in the flowcell. The other side of the tape was pasted on the LNA coated cover glass to build the microfluidic device. Two holes were punched at the two end of the microchannel with a biopsy punch, which acted as the inlet and outlet of the device and tubing were attached to allow liquid flow. The periphery of the PDMS slab was sealed on to the cover glass using epoxy glue.

Experimental Procedure for Single Cell mRNA Printing on Glass

[0170] A suspension of U87 cells in PBS was flowed in to the device and loaded into the microwells by gravity (kept upside down) for 5 mins at room temperature. After washing with PBS buffer supplemented with SUPERaseIN (Ambion), the microwells were sealed using an automated mechanical device by placing the flow cell upside down on a screw mounted on a motorized z-stage (ASI) so that the top PDMS slab containing the microwells was pressed against the glass bottom. After sealing the wells mechanically, the seal was retained by hermetic sealing to trap the single cell lysate within a single microwell. The cells were lysed by freeze-thaw. Once the cells lysed, the mRNAs were captured on the LNA surface by hybridization of the 3′-polyA tail of the mRNA to the LNA-oligo(dT) during a 60 minute incubation. The microwells were then unsealed and the flow cell was immediately and vigorously washed with the Wash Buffer (20 mM Tris pH 8.0, 50 mM NaCl, 0.1% Tween-20), supplemented with SUPERaseIN (FIG. 2A). The flowcell was then incubated with TURBO DNase (Ambion) in TURBO DNase buffer, supplemented with 0.1% Tween-20 and SUPERaseIN for 30 mins at 37° C. to digest any residual genomic DNA. The mRNA captured on the LNA surface was reverse transcribed using M-MuLV Reverse Transcriptase (New England Biolabs) for 2 hours at 42° C. in 1×M-MuLV Reverse Transcriptase buffer, supplemented with 10 mM DTT, 5 mM dNTPs, 0.1% Tween-20 and SUPERaseIN. After reverse transcription the double stranded RNA-cDNA hybrids were stained with 10 nM SYTOX Orange dye (Invitrogen), an intercalator that is selective for double-stranded DNA, and incubated for 5 mins prior to imaging.

[0171] The epifluorescence imaging system was constructed on an inverted Nikon Eclipse Ti—U microscope with 20×, 0.75 NA air objective (Plan Apo X, Nikon). SYTOX Orange was excited using a 532 nm diode-pumped solid state laser (Dragon Lasers), and the fluorescence was collected and imaged onto an electron multiplying charge coupled device (EMCCD) camera (iXON3, Andor Technologies). The images were acquired with 0.5 s exposure time (controlled by external shutter) at 1 MHz digitization (with no EM gain). Automated scanning of the surface (motorized X-Y stage, ASI), image acquisition, and illumination were controlled with custom software written in C/C++. The images were analyzed using ImageJ software.

### Microfluidic Device for Single Cell RNA-Seq

[0172] For the single cell RNA-Seq experiment a monolithic PDMS was designated based multi-channel device, by fabricating each channel with a microwell array. Two key soft lithography techniques were used to fabricate this device. First, instead of using silicon wafer master directly for fabricating the microwell array as done in the case of RNA printing device, we generated a secondary master made out of PDMS. This was done because the aspect ratio of the micropillars results in a relatively fragile silicon master. It was found that the PDMS master to be more durable. Second, instead of using a double-sided adhesive tape for the device assembly, the bottom and the top of the device were bonded together by partial curing. This provided us with more durable and reliable partitions between the individual channels of our device than could be generated using tape. For the multi-lane microfluidic device, two different silicon wafer masters were fabricated, one for the top and other for the bottom containing the array of microwells. Masters for soft lithography were generated from 4-inch silicon test wafers (University Wafer) coated with SU-8 2005 (MicroChem) photoresist. The wafer master for the bottom of the device contained five arrays of cylindrical pillars (diameter 50 micron; height 50 micron). The wafer was then fluorosilanized as described above. To avoid repeated use of the silicon wafer, we fabricated secondary masters in PDMS as follows. 40 g of degassed PDMS 10:1 (base: curing agent) was poured and cured on the wafer, and then peeled off and cut into a rectangular slab. The surface containing an array of microwells was oxidized in plasma chamber (Harrick Plasma) for ˜2 mins and immediately fluorosilanized. Using this microwell-containing slab as a master, ˜10 g of degassed PDMS was cured on it and peeled off. This new PDMS slab containing array of pillars is an exact replica of the silicon wafer, and is fluorosilanized and served as a secondary master for soft lithography for microfabrication of the bottom part of the microfluidic flowcell device. ˜2 g of degassed PDMS 10:1 (base: curing agent) was poured on a plasma cleaned glass slide and the secondary master with pillar array was placed gently with pillars immersed into the liquid PDMS. The slide, PDMS and master (on top) was degassed for ˜5 mins and then cured hard at 90° C. for 2 hours. After curing, the master is peeled off and a thin layer of PDMS is bonded to the glass slide with 5 lane arrays of microwells.

[0173] A second silicon wafer master was constructed containing five longitudinal ridges (with a height of 100 microns) with rounded ends on which ˜30 g of degassed PDMS 15:1 (base: curing agent) was poured and allowed to cure partially at 60° C. for 90 mins. The partially cured PDMS was cut into a slab, holes were punched at either end of each channel, and the slab was placed gently on the top of the glass slide containing the microwell array in such a way that the longitudinal grooves were aligned over each of the five microwell arrays. The slide assembly was then incubated at 90° C. overnight to form a single monolithic PDMS structure as shown in FIG. 5A.

Synthesis of Uniquely Barcoded Beads for mRNA Capture

[0174] N-succinimide-coated Sepharose beads with a mean diameter of ˜30 μm were obtained from GE Healthcare in isopropanol. The beads were washed three times with water by centrifugation and re-suspended in a reaction mixture with a final concentration of 100 mM sodium borate (pH 8.5) and ˜0.8 mg/mL streptavidin (streptavidin from New England BioLabs was spiked with ˜2% AlexaFluor 647-labeled streptavidin from Life Technologies). The reaction was incubated at room temperature for one hour on a rotisserie to allow the streptavidin to covalently attach to the beads. The beads were then washed five times in Wash Buffer and incubated in 1 Wash Buffer for 30 minutes before using to completely quench any remaining reactive groups on the beads.

[0175] A dual-biotinylated oligonucleotide containing both the T7 promoter sequence and a partial Illumina adapter sequence (Table 1) were annealed to each of 96 oligonucleotides (Table 2) that are complementary to the partial Illumina adapter sequence on the 3′-end and contain a unique barcode and universal anchor sequence on the 5′-end (FIGS. 3A and 3B). Table 1 describes a list of oligonucleotides used for barcoding and library preparation in additional to list of cell-identifying barcodes in Table 2 for Experiment 1.

TABLE 1

| Oligonucleotide | |
|---|---|
| Name | Oligonucleotide Sequence |
| Bead Capture Oligo | AGGTAAGGTAATACGACTCACTATAGGGG |
| (5′-dual | TTCAGAGTTCTACAGTCCGACGATC |
| biotinylated) | |
| RT1 (Reverse | GCCTTGGCACCCGAGAATTCCANNNNNNN |
| Transcription | NCGTGATNNNNNN |
| Primer for Lane 1) | |
| RT2 (Reverse | GCCTTGGCACCCGAGAATTCCANNNNNNN |
| Transcription | NACATCGNNNNNN |
| Primer for Lane 2) | |
| RT3 (Reverse | GCCTTGGCACCCGAGAATTCCANNNNNNN |
| Transcription | NGCCTAANNNNNN |
| Primer for Lane 3) | |
| RT4 (Reverse | GCCTTGGCACCCGAGAATTCCANNNNNNN |
| Transcription | NTGGTCANNNNNN |
| Primer for Lane 4) | |
| RT5 (Reverse | GCCTTGGCACCCGAGAATTCCANNNNNNN |
| Transcription | NCACTGTNNNNNN |
| Primer for Lane 5) | |
| RP1 (PCR Primer 1) | AATGATACGGCGACCACCGAGATCTACAC |
| | GTTCAGAGTTCTACAGTCCGA |
| RPI1 (PCR Primer 2) | CAAGCAGAAGACGGCATACGAGATCGTGA |
| | TGTGACTGGAGTTCCTTGGCACCCGAGAA |
| | TTCCA |

TABLE 2

| Oligonucleotide Name | Oligonucleotide Sequence |
|---|---|
| FBC_Oligo1 | CAGGTCAACCAGAGAGATCGTCGGACTGTAGAACTCTGAAC |
| FBC_Oligo2 | CAGGTCAAAGTACGCGATCGTCGGACTGTAGAACTCTGAAC |
| FBC_Oligo3 | CAGGTCGTTTGGCATGATCGTCGGACTGTAGAACTCTGAAC |
| FBC_Oligo4 | CAGGTCAAGTGAGGTGATCGTCGGACTGTAGAACTCTGAAC |
| FBC_Oligo5 | CAGGTCACGTTAGCTGATCGTCGGACTGTAGAACTCTGAAC |
| FBC_Oligo6 | CAGGTCGTGCTAGAGGATCGTCGGACTGTAGAACTCTGAAC |
| FBC_Oligo7 | CAGGTCGTCCTGTGTGATCGTCGGACTGTAGAACTCTGAAC |
| FBC_Oligo8 | CAGGTCTCTACGGCAGATCGTCGGACTGTAGAACTCTGAAC |
| FBC_Oligo9 | CAGGTCACAGGGCTTGATCGTCGGACTGTAGAACTCTGAAC |
| FBC_Oligo10 | CAGGTCGTGCGTTATGATCGTCGGACTGTAGAACTCTGAAC |
| FBC_Oligo11 | CAGGTCGGGTAAGTAGATCGTCGGACTGTAGAACTCTGAAC |
| FBC_Oligo12 | CAGGTCTCCCTTAGGGATCGTCGGACTGTAGAACTCTGAAC |
| FBC_Oligo13 | CAGGTCCAAGTTGGTGATCGTCGGACTGTAGAACTCTGAAC |
| FBC_Oligo14 | CAGGTCTTCTCACTCGATCGTCGGACTGTAGAACTCTGAAC |
| FBC_Oligo15 | CAGGTCTCCCACTCTGATCGTCGGACTGTAGAACTCTGAAC |
| FBC_Oligo16 | CAGGTCCGGTATACCGATCGTCGGACTGTAGAACTCTGAAC |
| FBC_Oligo17 | CAGGTCAGGCATGTGGATCGTCGGACTGTAGAACTCTGAAC |
| FBC_Oligo18 | CAGGTCCCCAGATTGGATCGTCGGACTGTAGAACTCTGAAC |
| FBC_Oligo19 | CAGGTCTTCCCTTGAGATCGTCGGACTGTAGAACTCTGAAC |
| FBC_Oligo20 | CAGGTCGTTGTACGAGATCGTCGGACTGTAGAACTCTGAAC |
| FBC_Oligo21 | CAGGTCTGCTTGCAGGATCGTCGGACTGTAGAACTCTGAAC |
| FBC_Oligo22 | CAGGTCGGCCTCATTGATCGTCGGACTGTAGAACTCTGAAC |
| FBC_Oligo23 | CAGGTCAACAGCCTAGATCGTCGGACTGTAGAACTCTGAAC |
| FBC_Oligo24 | CAGGTCGATGCAATGGATCGTCGGACTGTAGAACTCTGAAC |
| FBC_Oligo25 | CAGGTCGAAGGAACGGATCGTCGGACTGTAGAACTCTGAAC |
| FBC_Oligo26 | CAGGTCCAGCCACTTGATCGTCGGACTGTAGAACTCTGAAC |
| FBC_Oligo27 | CAGGTCCTCTGCTTCGATCGTCGGACTGTAGAACTCTGAAC |
| FBC_Oligo28 | CAGGTCGGCTTATGAGATCGTCGGACTGTAGAACTCTGAAC |
| FBC_Oligo29 | CAGGTCCTAGTCCTCGATCGTCGGACTGTAGAACTCTGAAC |
| FBC_Oligo30 | CAGGTCCTAGAGGAGGATCGTCGGACTGTAGAACTCTGAAC |
| FBC_Oligo31 | CAGGTCAGCTTTACCGATCGTCGGACTGTAGAACTCTGAAC |
| FBC_Oligo32 | CAGGTCGTCCATGAAGATCGTCGGACTGTAGAACTCTGAAC |
| FBC_Oligo33 | CAGGTCCTCGAACCTGATCGTCGGACTGTAGAACTCTGAAC |
| FBC_Oligo34 | CAGGTCCATTGTACGGATCGTCGGACTGTAGAACTCTGAAC |
| FBC_Oligo35 | CAGGTCTTGAACGCTGATCGTCGGACTGTAGAACTCTGAAC |
| FBC_Oligo36 | CAGGTCTACGTCATGGATCGTCGGACTGTAGAACTCTGAAC |
| FBC_Oligo37 | CAGGTCAAGCCGTTAGATCGTCGGACTGTAGAACTCTGAAC |
| FBC_Oligo38 | CAGGTCCGGACGTATGATCGTCGGACTGTAGAACTCTGAAC |
| FBC_Oligo39 | CAGGTCTCGTTACCGGATCGTCGGACTGTAGAACTCTGAAC |
| FBC_Oligo40 | CAGGTCATCCCCCATGATCGTCGGACTGTAGAACTCTGAAC |
| FBC_Oligo41 | CAGGTCCAGACGATTGATCGTCGGACTGTAGAACTCTGAAC |
| FBC_Oligo42 | CAGGTCATCGATCCCGATCGTCGGACTGTAGAACTCTGAAC |
| FBC_Oligo43 | CAGGTCCCTGAGGATGATCGTCGGACTGTAGAACTCTGAAC |
| FBC_Oligo44 | CAGGTCAGCTCTTTGGATCGTCGGACTGTAGAACTCTGAAC |
| FBC_Oligo45 | CAGGTCGGAATACGGGATCGTCGGACTGTAGAACTCTGAAC |
| FBC_Oligo46 | CAGGTCCTATCCTGGGATCGTCGGACTGTAGAACTCTGAAC |
| FBC_Oligo47 | CAGGTCGGTTGTAGTGATCGTCGGACTGTAGAACTCTGAAC |
| FBC_Oligo48 | CAGGTCGAACGTAGCGATCGTCGGACTGTAGAACTCTGAAC |
| FBC_Oligo49 | CAGGTCGTCTATCGGATCGTCGGACTGTAGAACTCTGAAC |
| FBC_Oligo50 | CAGGTCTACGAGTGGATCGTCGGACTGTAGAACTCTGAAC |
| FBC_Oligo51 | CAGGTCTCATGTCGGATCGTCGGACTGTAGAACTCTGAAC |
| FBC_Oligo52 | CAGGTCAAACACCCGATCGTCGGACTGTAGAACTCTGAAC |
| FBC_Oligo53 | CAGGTCACTAGTCCGATCGTCGGACTGTAGAACTCTGAAC |
| FBC_Oligo54 | CAGGTCCGAGGAATGATCGTCGGACTGTAGAACTCTGAAC |
| FBC_Oligo55 | CAGGTCACAATGGCGATCGTCGGACTGTAGAACTCTGAAC |

[0176] Table 2 describes a list of ooligonucleotide sequences used to generate the first set of barcoded beads (FBC) for combinatorial synthesis in Experiment 1.

[0177] The dual-biotinylated oligonucleotide was annealed at a final concentration of 2 μM in the presence of a four-fold molar excess of the barcoded oligonucleotide in a 96-well plate by stepwise cooling from 85° C. to 30° C. over 30 minutes. A DNA polymerase master mix was then added to each well such that the final concentration of the reaction components was 1×NEB Buffer 2 (New England BioLabs), 0.25 U/μL Klenow Fragment (exo-) (New England BioLabs), and 0.5 mM dNTPs. The reaction was incubated in each well at 37 C for 30 minutes before heat inactivating the polymerase at 75° C. for 20 minutes.

[0178] An equal volume of beads was then added to each reaction mixture so that the extended, dual-biotinylated oligonucleotide could conjugate to the streptavidin coated beads at a final density of ˜1 billion oligonucleotide primers per bead. The conjugation reaction was incubated at room temperature overnight on a rotisserie and quenched with biotin at a final concentration of 2 mM and sodium hydroxide at a final concentration of 125 mM to melt the template strand off of the beads. The beads were then pooled and washed five times in 125 mM sodium hydroxide supplemented with 0.1 mM biotin and then washed an additional three times with Wash Buffer and 0.1 mM biotin. The beads were then re-suspended in Hybridization Buffer (20 mM Tris pH 8.0, 1 M NaCl, 0.1% Tween-20) supplemented with 0.1 mM biotin.

[0179] The pooled beads were split into ten reactions to which one of ten partially complementary oligonucleotides (Table 3) each containing a specific second barcode was added at a final concentration of 5 μM. The second barcode-containing oligonucleotides were allowed to hybridize to the beads at room temperature overnight on a rotisserie.

TABLE 3

| Oligonuc- | |
|---|---|
| leotide | |
| Name | Oligonucleotide Sequence |
| SBC_Oligo1 | AAAAAAAAAAAAAAAAAAAAAAAAAGGTGATACAGGTC |
| | AAAAAAAAAGATCGTCGGACTGTAGAACTC |
| SBC_Oligo2 | AAAAAAAAAAAAAAAAAAAAAAAAATGAATGCCAGGTC |
| | AAAAAAAAAGATCGTCGGACTGTAGAACTC |
| SBC_Oligo3 | AAAAAAAAAAAAAAAAAAAAAAAAATGCCAAACAGGTC |
| | AAAAAAAAAGATCGTCGGACTGTAGAACTC |
| SBC_Oligo4 | AAAAAAAAAAAAAAAAAAAAAAAAAACAGAAGCAGGTC |
| | AAAAAAAAAGATCGTCGGACTGTAGAACTC |
| SBC_Oligo5 | AAAAAAAAAAAAAAAAAAAAAAAAACACTGGACAGGTC |
| | AAAAAAAAAGATCGTCGGACTGTAGAACTC |
| SBC_Oligo6 | AAAAAAAAAAAAAAAAAAAAAAAAACGATGATCAGGTC |
| | AAAAAAAAAGATCGTCGGACTGTAGAACTC |
| SBC_Oligo7 | AAAAAAAAAAAAAAAAAAAAAAAAAGTGTCCACAGGTC |
| | AAAAAAAAAGATCGTCGGACTGTAGAACTC |
| SBC_Oligo8 | AAAAAAAAAAAAAAAAAAAAAAAAATCCTCTTCAGGTC |
| | AAAAAAAAAGATCGTCGGACTGTAGAACTC |
| SBC_Oligo9 | AAAAAAAAAAAAAAAAAAAAAAAAAGTGCAGTCAGGTC |
| | AAAAAAAAAGATCGTCGGACTGTAGAACTC |
| SBC_Oligo10 | AAAAAAAAAAAAAAAAAAAAAAAAAAGGTAGACAGGTC |
| | AAAAAAAAAGATCGTCGGACTGTAGAACTC |

[0180] Table 3 describes oligonucleotide sequences used to generate the second set of barcoded beads (SBC) for combinatorial synthesis in Experiment 1.

[0181] The beads were then washed five times in Wash Buffer supplemented with 0.1 mM biotin and then re-suspended in a reaction mixture with final concentrations of 0.5 mM dNTPs, 1×NEB Buffer 2 (New England BioLabs), and 0.1 mM biotin. We included biotin in the wash and storage buffers in order to saturate any remaining streptavidin sites on the beads so that, in the even that a barcoded capture primer dissociates form a beads, it cannot re-associate with a different bead. The reactions were cooled to 16° C. on a thermocycler and Klenow Fragment (exo-) (New England BioLabs) was added at a final concentration of 0.25 U/μL. The reaction was incubated for one hour at 16° C. with mixing every 10 minutes with a pipette followed by heat inactivation at 75° C. for 20 minutes.

[0182] The ten reaction mixtures were then quenched and the hybridized strand was denatured by addition of sodium hydroxide to a final concentration of 125 mM. The reaction mixtures were then washed five times in 125 mM sodium hydroxide with 0.1 mM biotin, pooled, and then further washed three times with Wash Buffer supplemented with 0.1 mM biotin.

### Procedure for Single Cell RNA-Seq Experiment 1

[0183] Prior to the experiment, each lane of the device was flushed with 0.1% Tween-20 solution and incubated for several hours to hydrate the microwells, which were subsequently washed with 2 mL of phosphate-buffered saline (PBS). Cell suspensions were counted using Countess automated cell counter (Life Technologies). A suspension of cells in PBS mixed with Calcein AM (live stain) dye was flowed in to each lane and incubated for ˜5 mins, so that the cells load in to the microwells under gravity. After thoroughly washing out the excess cells with PBS, a suspension of barcoded capture beads that had been pre-counted by microscopy was introduced in PBS and allowed to load under gravity for ˜5 mins. In an aspect, ˜3,000 cells to each lane of the device was introduced. It is also noted that only 25% of the lower surface of each channel contains a microwell array, and so by expanding this area, the number of cells captured without incurring increased reagent costs for on-chip library generation were significantly increased (for example, as long as the size of the barcode pool was pooled). Excess beads were washed out thoroughly with PBS and the flow cell was incubated on ice. 20 μL 0.08% TritonX-100 (Sigma) supplemented with SUPERaseIN in PBS was flowed under ice-cold conditions immediately followed by fluorinert oil (Sigma) to seal the device. After two cycles of freeze-thaw at −80° C. to enhance cell lysis, the device was incubated at room temperature for 60 mins for mRNA capture (FIG. 2A).

[0184] Two of the lanes contained pure U87 and MCF10a cells, respectively, and other lanes were loaded with a mixture of both the cell types. All lanes were imaged twice, first with blue laser (λₑₓ=473 nm, Dragon Lasers) for imaging the cells and secondly with a red laser (λₑₓ=637 nm, Obis, Coherent) for imaging the beads labeled with AlexaFluor 647 tagged streptavidin. We used the two-color images to determine number of bead-cell pairs in the array. After an hour of incubation for mRNA capture, all the lanes were unsealed by rapid washing of the oil with 20 mM Tris, containing 1% TritonX-100 and SUPERaseIN, followed by Wash Buffer supplemented with SUPERaseIN. After this point the microwells stay open and subsequent enzymatic steps occur simultaneously in separate lanes of the open device.

[0185] The single cell library preparation protocol is adopted from the recently reported CEL-Seq protocol with few modifications as described below. The mRNA captured on the beads was reverse transcribed using ProtoScript II Reverse Transcriptase (New England Biolabs) for 2 hours at 42° C. in 1× ProtoScript Reverse Transcriptase buffer, supplemented with 10 mM DTT, 0.5 mM dNTPs, 0.1% Tween-20 and SUPERaseIN. The reaction mixture was washed out with Wash Buffer. The second strand synthesis was carried out using reagents from the MessageAmp II aRNA amplification kit (Ambion), where a mixture of DNA polymerase and RNaseH in second strand buffer was used along with dNTPs by incubating the device at 16° C. for 2 hours. After flushing out the second strand reaction mixture with Wash Buffer, an in vitro transcription mixture from the MessageAmp II kit containing four nucleotides and T7 RNA polymerase enzyme mix in T7 buffer was introduced to all lanes and incubated for 13 hours at 37° C. (FIGS. 5A-5C). The reaction linearly amplified our cDNA, eluting pools of barcoded aRNA into the flow channels of the device which was then removed from each lane using a pipette and purified separately using RNA Clean & Concentrator columns (Zymo) and eluted into five separate tubes. The aRNA from the 5 lanes was reverse transcribed separately using random hexamers tagged with five different barcodes and 8-base UMIs to differentiate cDNA for all five lanes and part of an Illumina sequencing adapter. The aRNA along with the hexamer primers was heated to 70° C. for 2 mins and immediately placed on ice for 5 mins. The reverse transcription mix containing PrimeScript Reverse Transcriptase (Clontech-Takara), 0.5 mM dNTPs, 10 mM DTT, 1× PrimeScript buffer supplemented with SUPERaseIN was added and incubated at 25° C. for 10 mins followed by 2 hour incubation at 42° C. The RNA-cDNA hybrid product was purified twice using 0.65× ratio of Agencourt Ampure beads (Beckman Coulter) and the purified cDNA from all the lanes were pooled together for PCR. Phusion High Fidelity DNA polymerase (New England Biolabs) was used for amplifying the cDNA using RP1 and RPI Illumina primers in 1× PhusionHF buffer supplemented with dNTPs. The PCR product was purified on a 1.5% agarose gel which was stained with SybrGold (Life Technologies) before being cut between 400-800 bp. The library was extracted from the gel using Gel Extraction kit (Qiagen), and further purified and concentrated using a 0.65× ratio of the AMpure beads (Beckman Coulter). The final library was quantified using a Qubit (Life Technologies) and Bioanalyzer (Agilent) and sequenced on NextSeq 500 desktop sequencer (Illumina). ˜240 million paired-end reads with a 26-base first read and a 66-base second read were obtained.

### Procedure for Single Cell RNA-Seq Experiment 2

[0186] Experiment 2 was identical to Experiment 1 with a few exceptions. First, the two cell types under study were U87 human glioma cells and WI-38 human fibroblast cells (a diploid, limited-passage, non-cancer cell line). Second, reagents from the HiScribe In Vitro Transcription kit (New England BioLabs) were substituted for the MessageAmp II kit for the IVT portion of the protocol. Third, some of the oligonucleotides used were different from in Experiment 1 and are tabulated as detailed in Tables 4-6.

[0187] Table 4 describes a group of preferred oligonucleotides used for barcoding and library preparation for Experiment 2.

TABLE 4

| Oligonuc- | |
|---|---|
| leotide | |
| Name | Oligonucleotide Sequence |
| Bead Capture Oligo | AGGTAAGGTAATACGACTCACTATAGGGG |
| (5′-dual | TTCAGAGTTCTACAGTCCGACGATC |
| biotinylated) | |
| RT1 (Reverse | GCCTTGGCACCCGAGAATTCCANNNNNNN |
| Transcription | NCGTCATNNNNNN |
| Primer for Lane 1) | |
| RT2 (Reverse | GCCTTGGCACCCGAGAATTCCANNNNNNN |
| Transcription | NTACCCANNNNNN |
| Primer for Lane 2) | |
| RT3 (Reverse | GCCTTGGCACCCGAGAATTCCANNNNNNN |
| Transcription | NGCCATTNNNNNN |
| Primer for Lane 3) | |
| RT4 (Reverse | GCCTTGGCACCCGAGAATTCCANNNNNNN |
| Transcription | NGAGTACNNNNNN |
| Primer for Lane 4) | |
| RT5 (Reverse | GCCTTGGCACCCGAGAATTCCANNNNNNN |
| Transcription | NAGAGTCNNNNNN |
| Primer for Lane 5) | |
| RP1 (PCR Primer 1) | AATGATACGGCGACCACCGAGATCTACAC |
| | GTTCAGAGTTCTACAGTCCGA |
| RPI2 (PCR Primer 2) | CAAGCAGAAGACGGCATACGAGATACATC |
| | GGTGACTGGAGTTCCTTGGCACCCGAGAA |
| | TTCCA |

[0188] Table 5 describes oligonucleotide sequences used to generate the first set of barcoded beads (FBC) for combinatorial synthesis in Experiment 2.

TABLE 5

| Oligonucleotide Name | Oligonucleotide Sequence |
|---|---|
| FBC_Oligo1 | CAGGTCCTGATCGATGATCGTCGGACTGTAGAACTCTGAAC |
| FBC_Oligo2 | CAGGTCGTGTAGACAGATCGTCGGACTGTAGAACTCTGAAC |
| FBC_Oligo3 | CAGGTCCATTGTTCCGATCGTCGGACTGTAGAACTCTGAAC |
| FBC_Oligo4 | CAGGTCCTTGACTACGATCGTCGGACTGTAGAACTCTGAAC |
| FBC_Oligo5 | CAGGTCACCGTTTCGGATCGTCGGACTGTAGAACTCTGAAC |
| FBC_Oligo6 | CAGGTCAAGGACCGTGATCGTCGGACTGTAGAACTCTGAAC |
| FBC_Oligo7 | CAGGTCTCACTATGCGATCGTCGGACTGTAGAACTCTGAAC |
| FBC_Oligo8 | CAGGTCCTGCAATGGGATCGTCGGACTGTAGAACTCTGAAC |
| FBC_Oligo9 | CAGGTCTGAGTCGTCGATCGTCGGACTGTAGAACTCTGAAC |
| FBC_Oligo10 | CAGGTCCTCACACTAGATCGTCGGACTGTAGAACTCTGAAC |
| FBC_Oligo11 | CAGGTCTTACCCCCTGATCGTCGGACTGTAGAACTCTGAAC |
| FBC_Oligo12 | CAGGTCCCAAGTAGAGATCGTCGGACTGTAGAACTCTGAAC |
| FBC_Oligo13 | CAGGTCATAGCGCACGATCGTCGGACTGTAGAACTCTGAAC |
| FBC_Oligo14 | CAGGTCTGACGTACGGATCGTCGGACTGTAGAACTCTGAAC |
| FBC_Oligo15 | CAGGTCGTAGAGTTGGATCGTCGGACTGTAGAACTCTGAAC |
| FBC_Oligo16 | CAGGTCTTTCTGGCGGATCGTCGGACTGTAGAACTCTGAAC |
| FBC_Oligo17 | CAGGTCGGAATGTGTGATCGTCGGACTGTAGAACTCTGAAC |
| FBC_Oligo18 | CAGGTCCTATGGAAGGATCGTCGGACTGTAGAACTCTGAAC |
| FBC_Oligo19 | CAGGTCAAGTCCATGGATCGTCGGACTGTAGAACTCTGAAC |
| FBC_Oligo20 | CAGGTCAGTACTTGGGATCGTCGGACTGTAGAACTCTGAAC |
| FBC_Oligo21 | CAGGTCACAGGACTAGATCGTCGGACTGTAGAACTCTGAAC |
| FBC_Oligo22 | CAGGTCACCAGGTAAGATCGTCGGACTGTAGAACTCTGAAC |
| FBC_Oligo23 | CAGGTCGCATGAACCGATCGTCGGACTGTAGAACTCTGAAC |
| FBC_Oligo24 | CAGGTCGTTGGTGTTGATCGTCGGACTGTAGAACTCTGAAC |
| FBC_Oligo25 | CAGGTCCCTTCAGACGATCGTCGGACTGTAGAACTCTGAAC |
| FBC_Oligo26 | CAGGTCCCTCTTGGTGATCGTCGGACTGTAGAACTCTGAAC |
| FBC_Oligo27 | CAGGTCGGGAAAGTTGATCGTCGGACTGTAGAACTCTGAAC |
| FBC_Oligo28 | CAGGTCAGCCAGAGTGATCGTCGGACTGTAGAACTCTGAAC |
| FBC_Oligo29 | CAGGTCTCGCATCTGGATCGTCGGACTGTAGAACTCTGAAC |
| FBC_Oligo30 | CAGGTCGATACGGCAGATCGTCGGACTGTAGAACTCTGAAC |
| FBC_Oligo31 | CAGGTCTCGGCCAAAGATCGTCGGACTGTAGAACTCTGAAC |
| FBC_Oligo32 | CAGGTCAGATTTCGCGATCGTCGGACTGTAGAACTCTGAAC |
| FBC_Oligo33 | CAGGTCGACCCTCAAGATCGTCGGACTGTAGAACTCTGAAC |
| FBC_Oligo34 | CAGGTCAGTCCACTCGATCGTCGGACTGTAGAACTCTGAAC |
| FBC_Oligo35 | CAGGTCCAAACGATCGATCGTCGGACTGTAGAACTCTGAAC |
| FBC_Oligo36 | CAGGTCGCCTAATAGGATCGTCGGACTGTAGAACTCTGAAC |
| FBC_Oligo37 | CAGGTCGGCTACATCGATCGTCGGACTGTAGAACTCTGAAC |
| FBC_Oligo38 | CAGGTCTATGAGCAGGATCGTCGGACTGTAGAACTCTGAAC |
| FBC_Oligo39 | CAGGTCGGTAGTAACGATCGTCGGACTGTAGAACTCTGAAC |
| FBC_Oligo40 | CAGGTCCGCGTATATGATCGTCGGACTGTAGAACTCTGAAC |
| FBC_Oligo41 | CAGGTCTACTGGAGCGATCGTCGGACTGTAGAACTCTGAAC |
| FBC_Oligo42 | CAGGTCAGGGAATCAGATCGTCGGACTGTAGAACTCTGAAC |
| FBC_Oligo43 | CAGGTCATCCGAGATGATCGTCGGACTGTAGAACTCTGAAC |
| FBC_Oligo44 | CAGGTCTCCCAAGCAGATCGTCGGACTGTAGAACTCTGAAC |
| FBC_Oligo45 | CAGGTCGAGCCGTTTGATCGTCGGACTGTAGAACTCTGAAC |
| FBC_Oligo46 | CAGGTCTGCTCTTACGATCGTCGGACTGTAGAACTCTGAAC |
| FBC_Oligo47 | CAGGTCACGACTACCGATCGTCGGACTGTAGAACTCTGAAC |
| FBC_Oligo48 | CAGGTCCAAGCAGCTGATCGTCGGACTGTAGAACTCTGAAC |
| FBC_Oligo49 | CAGGTCGTATTCGCGATCGTCGGACTGTAGAACTCTGAAC |
| FBC_Oligo50 | CAGGTCGCTCTGAAGATCGTCGGACTGTAGAACTCTGAAC |
| FBC_Oligo51 | CAGGTCACGTAGTGGATCGTCGGACTGTAGAACTCTGAAC |
| FBC_Oligo52 | CAGGTCATTGGGTCGATCGTCGGACTGTAGAACTCTGAAC |
| FBC_Oligo53 | CAGGTCAACAGCACGATCGTCGGACTGTAGAACTCTGAAC |
| FBC_Oligo54 | CAGGTCTCAGAGACGATCGTCGGACTGTAGAACTCTGAAC |
| FBC_Oligo55 | CAGGTCGTGTGCTAGATCGTCGGACTGTAGAACTCTGAAC |
| FBC_Oligo56 | CAGGTCGCAGTTGAGATCGTCGGACTGTAGAACTCTGAAC |
| FBC_Oligo57 | CAGGTCTTAACGGGGATCGTCGGACTGTAGAACTCTGAAC |
| FBC_Oligo58 | CAGGTCGCTCGATTGATCGTCGGACTGTAGAACTCTGAAC |
| FBC_Oligo59 | CAGGTCACACCTGTGATCGTCGGACTGTAGAACTCTGAAC |
| FBC_Oligo60 | CAGGTCAGACGGTTGATCGTCGGACTGTAGAACTCTGAAC |
| FBC_Oligo61 | CAGGTCGCAAACCAGATCGTCGGACTGTAGAACTCTGAAC |
| FBC_Oligo62 | CAGGTCGAGTATGGGATCGTCGGACTGTAGAACTCTGAAC |
| FBC_Oligo63 | CAGGTCGGTCTTTCGATCGTCGGACTGTAGAACTCTGAAC |
| FBC_Oligo64 | CAGGTCCATCTGCTGATCGTCGGACTGTAGAACTCTGAAC |
| FBC_Oligo65 | CAGGTCTTCGCAAGGATCGTCGGACTGTAGAACTCTGAAC |
| FBC_Oligo66 | CAGGTCTTGTGACGGATCGTCGGACTGTAGAACTCTGAAC |
| FBC_Oligo67 | CAGGTCTGCATGACGATCGTCGGACTGTAGAACTCTGAAC |
| FBC_Oligo68 | CAGGTCCAACGTGAGATCGTCGGACTGTAGAACTCTGAAC |
| FBC_Oligo69 | CAGGTCTAGGCTTCGATCGTCGGACTGTAGAACTCTGAAC |
| FBC_Oligo70 | CAGGTCTGGTAGGAGATCGTCGGACTGTAGAACTCTGAAC |
| FBC_Oligo71 | CAGGTCTGCAGCTTGATCGTCGGACTGTAGAACTCTGAAC |
| FBC_Oligo72 | CAGGTCCTGTACCTGATCGTCGGACTGTAGAACTCTGAAC |
| FBC_Oligo73 | CAGGTCCGCAATGAGATCGTCGGACTGTAGAACTCTGAAC |
| FBC_Oligo74 | CAGGTCGATCCAAGGATCGTCGGACTGTAGAACTCTGAAC |
| FBC_Oligo75 | CAGGTCCACTTACGGATCGTCGGACTGTAGAACTCTGAAC |
| FBC_Oligo76 | CAGGTCAACTAGGCGATCGTCGGACTGTAGAACTCTGAAC |
| FBC_Oligo77 | CAGGTCACTAGCGTGATCGTCGGACTGTAGAACTCTGAAC |
| FBC_Oligo78 | CAGGTCCGTTCGTTGATCGTCGGACTGTAGAACTCTGAAC |
| FBC_Oligo79 | CAGGTCAGTCACGAGATCGTCGGACTGTAGAACTCTGAAC |
| FBC_Oligo80 | CAGGTCCCTGTAACGATCGTCGGACTGTAGAACTCTGAAC |
| FBC_Oligo81 | CAGGTCGTCCTCTTGATCGTCGGACTGTAGAACTCTGAAC |
| FBC_Oligo82 | CAGGTCCAGCGAATGATCGTCGGACTGTAGAACTCTGAAC |
| FBC_Oligo83 | CAGGTCATGGTTGGGATCGTCGGACTGTAGAACTCTGAAC |
| FBC_Oligo84 | CAGGTCGAGGTTCTGATCGTCGGACTGTAGAACTCTGAAC |
| FBC_Oligo85 | CAGGTCTACCTCGAGATCGTCGGACTGTAGAACTCTGAAC |
| FBC_Oligo86 | CAGGTCTTCTGTGCGATCGTCGGACTGTAGAACTCTGAAC |
| FBC_Oligo87 | CAGGTCGACAACTGGATCGTCGGACTGTAGAACTCTGAAC |
| FBC_Oligo88 | CAGGTCCGACAACAGATCGTCGGACTGTAGAACTCTGAAC |
| FBC_Oligo89 | CAGGTCTCGATACCGATCGTCGGACTGTAGAACTCTGAAC |
| FBC_Oligo90 | CAGGTCCCATACTCGATCGTCGGACTGTAGAACTCTGAAC |
| FBC_Oligo91 | CAGGTCATTCGCAGGATCGTCGGACTGTAGAACTCTGAAC |
| FBC_Oligo92 | CAGGTCACCATAGGGATCGTCGGACTGTAGAACTCTGAAC |
| FBC_Oligo93 | CAGGTCCGATCAAGGATCGTCGGACTGTAGAACTCTGAAC |
| FBC_Oligo94 | CAGGTCACCTTGCTGATCGTCGGACTGTAGAACTCTGAAC |
| FBC_Oligo95 | CAGGTCGACTCAGTGATCGTCGGACTGTAGAACTCTGAAC |
| FBC_Oligo96 | CAGGTCGTCAATCCGATCGTCGGACTGTAGAACTCTGAAC |

[0189] Table 6 provides for oligonucleotide sequences used to generate the second set of barcoded beads (SBC) for combinatorial synthesis in Experiment 2.

TABLE 6

| Oligonuc- | |
|---|---|
| leotide | |
| Name | Oligonucleotide Sequence |
| SBC_Oligo1 | AAAAAAAAAAAAAAAAAAAAAAAAAGGTGATACAGGTC |
| | AAAAAAAAAGATCGTCGGACTGTAGAACTC |
| SBC_Oligo2 | AAAAAAAAAAAAAAAAAAAAAAAAATGAATGCCAGGTC |
| | AAAAAAAAAGATCGTCGGACTGTAGAACTC |
| SBC_Oligo3 | AAAAAAAAAAAAAAAAAAAAAAAAATGCCAAACAGGTC |
| | AAAAAAAAAGATCGTCGGACTGTAGAACTC |
| SBC_Oligo4 | AAAAAAAAAAAAAAAAAAAAAAAAAACAGAAGCAGGTC |
| | AAAAAAAAAGATCGTCGGACTGTAGAACTC |
| SBC_Oligo5 | AAAAAAAAAAAAAAAAAAAAAAAAACACTGGACAGGTC |
| | AAAAAAAAAGATCGTCGGACTGTAGAACTC |
| SBC_Oligo6 | AAAAAAAAAAAAAAAAAAAAAAAAACGATGATCAGGTC |
| | AAAAAAAAAGATCGTCGGACTGTAGAACTC |
| SBC_Oligo7 | AAAAAAAAAAAAAAAAAAAAAAAAAGTGTCCACAGGTC |
| | AAAAAAAAAGATCGTCGGACTGTAGAACTC |
| SBC_Oligo8 | AAAAAAAAAAAAAAAAAAAAAAAAATCCTCTTCAGGTC |
| | AAAAAAAAAGATCGTCGGACTGTAGAACTC |
| SBC_Oligo9 | AAAAAAAAAAAAAAAAAAAAAAAAAGTGCAGTCAGGTC |
| | AAAAAAAAAGATCGTCGGACTGTAGAACTC |
| SBC_Oligo10 | AAAAAAAAAAAAAAAAAAAAAAAAAAGGTAGACAGGTC |
| | AAAAAAAAAGATCGTCGGACTGTAGAACTC |

### Analysis of Single Cell RNA-Seq Data

[0190] Read 1 of the single cell RNA-Seq data contains a cell-identifying barcode sequence followed by poly(dT), and read 2 contains a 8-base UMI followed by a 6-base lane-identifying barcode and a transcript sequence. The reads are first demultiplex based on the lane-identifying barcode while recording the corresponding UMI using a custom Python script. We then map the remainder of read 2 to the human genome and transcriptome (hg19, Ensembl annotation from Illumina iGenomes) using the STAR aligner. Mapped reads for each lane are then demultiplexed based on the cell-identifying barcodes in read 1 and assigned to a gene using HTSeq. Both the lane- and cell-identifying barcodes were allowed to have a single-base mismatch during demultiplexing.

[0191] The set of reads that uniquely mapped to the transcriptome were collected and assigned an address comprised of its cell-identifying barcode, gene, UMI, and mapping position. In addition, the reads that mapped to both the genome and transcriptome were kept, but that mapped to only one position on the transcriptome and mapped to that position with the appropriate strand-specificity. The reads to identify unique molecules were filtered. Reads with identical addresses were collapsed to a single molecule. In addition, reads with identical cell-identifying barcodes, genes, mapping positions, and with UMIs having a Hamming distance less than or equal to two were collapsed to a single molecule. All reads considered identical molecules by the above definition (UMIs with a Hamming distance less than or equal to two and mapping position within six bases) were removed but that also occurred with different cell-identifying barcodes within the same lane. This approach likely underestimates of the true number of molecules associated with each cell and gene and results in some loss of gene detection. However, it also removes molecules that may become spuriously associated with the incorrect cell via PCR recombination, as observed and similarly filtered in previous studies that used very similar library construction protocols.

[0192] To identify barcodes that correspond to actual individual cells in our device in Experiment 1, the observed cell-identifying barcodes were filtered by progressively downsampling the corresponding gene profiles to the same number of total reads and assessing the number of unique molecules detected from each cell-identifying barcode. After excluding cell-identifying barcodes having zero associated molecules, it was found that the distribution of associated unique molecules to be bimodal, with one small subpopulation having nearly as many unique molecules as reads at low read totals. It was found the size of this subpopulation to be in excellent agreement with our device imaging data. These 598 profiles were taken to represent the actual individual cells captured in the device with a barcoded bead. We used the same approach to assess the cell-identifying barcodes in Experiment 2.

[0193] The 396 single-cell profiles were kept with the highest coverage in the data set (all five lanes represented). The U87 and MCF10a single cell profiles were compared to bulk RNA-Seq profiles of U87 and MCF10a cells. Bulk RNA-Seq library from ˜10⁷ U87 cells were prepared using the TruSeq RNA-Seq library preparation kit (Illumina) and sequenced the library to a depth of ˜30 M, 100-base single-end reads on an Illumina HiSeq 2500. Publically available bulk RNA-Seq profile of MCF10a cells was obtained from the Gene Expression Omnibus (entry GSE45258). Reads were mapped to the transcriptome as described above and expression values (FPKM) were computed using Cufflinks. Pearson correlation coefficients between single cell and bulk profiles were computed between log-transformed single-cell expression profiles (unique molecules per million reads plus one) and log-transformed bulk values (FPKM plus one). Single cell median profiles were generated from different numbers of randomly selected single cell profiles and repeated this random sampling ten times without replacement for each data point in FIGS. 7A and 7B. For each Pearson correlation calculation, only genes with log-transformed single cell median or bulk values greater than 0.5 were included.

[0194] Differential expression analysis was conducted by comparing each detected gene in the two cell type-exclusive lanes using Wilcoxin's rank-sum test. Genes with p<0.05 were used for clustering analysis. Regardless of differential expression +/−(1−p) was used (which is positive for expression biased in one cell type and negative for expression biased towards a second cell type) for each gene as input to iPAGE, a mutual information-based algorithm that can associate gene ontologies with genes based on an assigned numerical value[35]. A matrix of pairwise Spearman correlation coefficients was generated based on unique molecules detected across 396 single cell profiles in Experiment 1 (247 profiles in Experiment 2) using only the differentially expressed genes. The data was then clustered with the MATLAB implementation t-SNE using the correlation matrix as input. The single cell profiles were color coated in the t-SNE clusters using a simple classifier score given by the log-ratio of the number of cell type-specific genes for each of the two cell types in a given cell with an above-average rank in expression level (FIG. 8C).

[0195] Table 7 describes estimated costs per reagents and associated costs in an aspect of the disclosure.

TABLE 7

| | | | Stock | | | |
|---|---|---|---|---|---|---|
| Reagent | Volume | | Volume | | Price of Stock | Price per Run |
| SUPERaseIN | 19 | uL | 500 | uL | $350.40 | $13.32 |
| (Ambion) | | | | | | |
| dNTPs (NEB) | 10 | uL | 800 | uL | $44.80 | $0.56 |
| HiScribe IVT Kit | 1 | uL | 50 | uL | $169.60 | $3.39 |
| (NEB) | | | | | | |
| MessageAamp II | 3 | uL | 740 | uL | $3,668.00 | $14.87 |
| Kit (Ambion) | | | | | | |
| PrimeScript RT | 5 | uL | 200 | uL | $501.63 | $12.54 |
| (Clontech) | | | | | | |
| Phusion | 0.5 | uL | 250 | uL | $336.00 | $0.67 |
| polymerase (NEB) | | | | | | |
| Lane Barcode RT | 15 | uL | 3155 | uL | $542.25 | $0.86 |
| primers (IDT) | | | | | | |
| NHS beads (GE) | 3.25 | uL | 25000 | uL | $155.80 | $0.02 |
| Streptavidin | 5 | uL | 1000 | uL | $188.80 | $0.94 |
| (NEB) | | | | | | |
| Dual-biotin | 0.64 | uL | 700 | uL | $225.75 | $0.21 |
| anchor oligo (IDT) | | | | | | |
| Klenow | 1.5 | uL | 200 | uL | $188.80 | $1.42 |
| fragment exo- | | | | | | |
| (NEB) | | | | | | |
| dNTPs (NEB) | 3.5 | uL | 800 | uL | $44.80 | $0.20 |
| FBC primers | 0.96 uL (all | | 240,000 (all | | $484.56 total | $0.002 |
| (IDT) | 96) | | 96) | | | |
| SBC primers | 0.66 uL (all | | 4000 uL (all | | $340.00 total | $0.67 |
| (IDT) | 10) | | 10) | | | |
| Experiment Costs | | | | | | $46.21 |
| Bead Costs | | | | | | $3.46 |
| Total Cost per | | | | | | $49.67 |
| Run | | | | | | |
| Cost per Cell | 250-500 | cells | | | | $0.10-$0.20 |

### Example 3

### Bead Synthesis

[0196] 1 million sequence-barcoded mRNA capture beads (MACOSKO-2011-10, ChemGenes) were washed 6 times with DI water, re-suspended in 1280 uL of DI water, and evenly distributed to 64 wells on a 96-well plate. The plate is then sealed with adhesive cover, vortexed for 5 minutes, centrifuged at 300 g for 1 minute, sonicated in a water batch sonicator (FS-20, Fisher Scientific) for 5 minutes, incubated at 4° C. for 12 hours, and centrifuged again at 300 g for 1 minute.

### Library Preparation and Sequencing of the Bead-Free DNA

[0197] 5 uL supernatant from each well was collected and mixed with 10 uL of 1 uM NexterapolyA primer and 2 uL 10× NEBuffer 2 (B7002S, NEB) in separate wells on a 96-well plate. The mixtures were incubated at 95° C. for 2 minutes, then cooled down to 25° C. on a thermocycler. 2 uL of 10 mM dNTPs (N0447S, NEB) and 1 uL of DNA polymerase (M0212S, NEB) were then added to each reaction mixture, incubated at 25° C. for 15 minutes and at 37° C. for 1 hour followed by heat inactivation of the DNA polymerase at 75° C. for 20 minutes, then cooled down to 4° C. 4 uL sample from each reaction was mixed with 2 uL of 2 uM well-specific barcoded custom P7 primer, 2 uL of 2 uM custom P5 primer (AATGATACGGCGACCACCGAGATCTACACGCCTGTCCGCGGAAGCAGTGGT ATCAACGCAGAGT*A*C, IDT), and 8 uL of 2× Kapa HiFi Hotstart Readymix (KK2601, Kapabiosystems). The mixture was then subjected to a PCR amplification protocol (95 C 3 minutes, 14 cycles of (95 C 10 s, 55 C 30 s, 72 C 30 s), 72 C 5 minutes, hold at 4 C). 5 uL of the PCR product from each reaction were pooled together and purified using the solid-phase reversible immobilization (SPRI) paramagnetic bead technology (A63880, Beckman Coulter) with a 2:1 bead-to-sample volume ratio and eluted in 50 uL of nuclease free water. The PCR product was further purified by gel electrophoresis (456-5034, Biorad). A 180 bp gel band (FIG. 19) was observed and extracted. The extracted product was further analyzed by capillary gel electrophoresis (5067-4626, Agilent Technologies) to further examine the length distribution of the purified product (FIGS. 20A and 20B).

Ligation of Optical Oligoes to the mRNA Capture Beads

[0198] The remaining beads in each well were washed with DI water and resuspended in a 50 uL reaction mixture that contained 5 uL of 10× T4 RNA ligase reaction buffer (M0204S, NEB), 25 uL of 50% PEG 8000 (M0204S, NEB), 5 uL of 10 Mm ATP (M0204S, NEB), 1 uL of 5% Tween-20, 2.5 uL of T4 RNA ligase 1 (M0204S, NEB), a well-specific unique combination of a set of 6 optical barcode oligo species (2 uL at 100 uM each), and water. The reactions were incubated at room temperature for 24 hours on a rotisserie. 5 uL of 10% SDS and 1 uL of 500 Mm EDTA were then added to each well, and incubated for 5 minutes at room temperature. All beads were then pooled together into a single microcentrifuge tube, washed twice with TE/TW buffer (10 mM Tris-HCl, 1 mM EDTA, 0.01% Tween-20, pH 8.0) and re-suspended in 1280 uL of TE/TW buffer.

[0199] The beads were subjected to a second round of the synthesis workflow described above using a separate set of 64 well-specific barcoded custom P7 primers in the PCR amplification of bead-free oligoes and a separate set of 6 optical barcode oligoes for the ligation reactions.

[0200] The 128 bead-free DNA libraries resulted from the above two rounds of synthesis reactions were sequenced on a NextSeq 500 machine (Illumina) with a custom read 1 sequencing primer (GCCTGTCCGCGGAAGCAGTGGTATCAACGCAGAGTAC, IDT). 21 bases were sequenced on read 1. The resulting raw fastq files were processed to obtain the list of sequence-barcoded mRNA capture beads that were present in each of the 128 ligation reactions to which a unique known combination of optical barcode oligoes were added. Thus, a two-column look-up table was obtained where each row represents a bead, one column contains a 12-base sequencing barcode sequence, and the other column contains a 12-digit binary optical barcode sequence.

### Example 4: Mixed Species Experiment

[0201] FIGS. 21A and 21B present integrated sequencing and imaging data for a mixed species experiment. Mixed human-mouse single-cell RNA-Seq data was projected using tSNE, revealing two clusters of cells that correspond to U87 (human) and 3T3 (mouse). The points in the tSNE plot were shaded according to the fluorescence intensity of the two live stain dyes, one of which was used to stain U87 (human) and 3T3 (mouse). The vast majority of cells with high fluorescence intensity in the channel used to image human cells are in the human cluster and vice versa, demonstrating the efficacy of the approach even without any error-correcting barcodes.

### Device Preparation

[0202] On the day before the experiment, a microwell array flow cell device that has 15,000 microwells was filled with wash buffer (20 Mm Tris-HCl, 50 Mm NaCl, 0.1% Tween-20, pH 7.9) and stored in a humid chamber (a pipette tip box half-filled with water) at room temperature. On the day of the experiment, the device was washed by TBS buffer.

### Cell Preparation

[0203] Human U87 cells and mouse 3T3 cells were live stained respectively with 4 uM green (C3100MP, ThermoFisher Scientific) and orange-red (C34851, ThermoFisher Scientific) live stain dyes in cell culture media (10% FBS in DMEM) in a 37° C. incubator for 15 minutes. The cells were then dissociated into single cell suspension in separate colonial tubes using 0.25% Trypsin-EDTA (25200-072, Life Technologies), re-suspended in TBS, and counted.

### Cell Loading and Imaging

[0204] The two cell lines were then mixed at 1:1 ratio and diluted into 1000 total cells/uL concentration. 20 uL diluted mixed species cell suspension was then pipetted into the microwell array flow cell device and incubated for 3 minutes. Any uncaptured cells were flushed out by a TBS buffer wash. The cell-loaded device was then scanned in three channels including bright field, green, and orange channels.

Reagent Preparation for scRNA-Seq Library Prep

[0205] While the device was being scanned, fresh lysis buffer (1% 2-Mercaptoethanol, 99% Buffer TCL (1031576, Qiagen)), RNase inhibitor doped wash buffer (0.02 U/uL SUPERaseIN (AM2696, Thermo Fisher Scientific) in wash buffer), reverse transcription (RT) reaction mix (1× Maxima RT buffer, 1 Mm dNTPs, 1 U/uL SUPERaseIN, 2.5 uM template switch oligo (AAGCAGTGGTATCAACGCAGAGTGAATrGrGrG, IDT), 10 U/uL Maxima H Minus reverse transcriptase (EP0752, Thermo Fisher Scientific), 0.1% Tween-20), and perfluorinated oil (F3556-25ML, Sigma-Aldrich) were prepared and loaded into their designated reservoirs on an automated reagent delivery/temperature control system as described before (Yuan & Sims, Scientific Reports 6, 33883 (2016)). The perfluorinated oil, lysis buffer, wash buffer reagent channels were primed by sequentially turning on the channels for 10 seconds, 10 seconds, and 30 seconds, respectively.

### Bead Loading

[0206] After the device scan was completed, about 20000 of dual-barcoded mRNA capture beads were re-suspended in 30 uL of TBS buffer and then loaded into the device. Gentle flow (<3 uL/s) were used for the bead loading and all subsequent fluid exchange in the device to minimize cell and bead loss. Bead suspension was circulated through the device 5 to 10 times to achieve a high bead loading rate (defined as the fraction of wells having a bead) and a high bead capture efficiency (defined as the fraction of beads captured in the wells). Uncaptured beads were then washed out by a TBS buffer wash.

Automated Cell Lysis, mRNA Capture, cDNA Synthesis and Barcoding

[0207] The cell/bead loaded device was then connected to the system for the automated cell lysis, mRNA capture, and cDNA synthesis and barcoding. The device was temporarily disconnected from the fluidic system, scanned on a fluorescence microscope, and then reconnected to the fluidic system. Fluorescent signal from the stained cell lysate is used to check sealing integrity and the completeness of cell lysis.

### Removal of Unused Capture Primers by Exo-I Digestion

[0208] When reverse transcription reaction was completed, the device was washed with wash buffer, refilled with Exo-I reaction mixture (1× Exo-I buffer, 1 U/uL Exo-I (M0293L, NEB)), and incubated at 37° C. for 45 minutes, cooled down to room temperature, and washed with TE/TW buffer.

### Sequential Fluorescence Hybridization

[0209] The device was then connected to an automated reagent delivery/scanning system for 12 rounds of sequential fluorescence hybridization in order to measure the presence of each of the 12 optical barcode oligoes on each bead in the device. Cy5-labled oligoes whose sequences are complementary to the ligated optical barcode oligoes were used as the read-out probes. During each round of fluorescence hybridization, the device was first scanned in both bright field and the Cy5 probe channel 200 nM probe diluted in wash buffer was then flowed into the device, followed by a 10-minute incubation step. Unbound probe molecules were then washed out using wash buffer. The device was scanned again in both bright field and Cy5 probe channel 150 mM NaOH in water was then flowed into the device, followed by a 10-minute incubation step. Detached probe molecules were then washed out using wash buffer, which concludes one round of fluorescence hybridization.

### Bead Extraction

[0210] Once all 12 rounds of fluoresce hybridization were complete, the device was cut evenly into multiple pieces using a razor blade such that each piece contained about 400 cell/bead pairs. The pieces were processed in parallel in separate reaction tubes. Beads in each piece were extracted by a 30-second gentle water bath sonication in ethanol followed by a 1-minute centrifugation at 200 g. The extracted beads were then washed with 1 mL 150 mM NaOH, 1 mL TE/TW buffer, and 1 mL water.

Pre-Amplification of Full-Length cDNA

[0211] The small pieces of device were then assembled together and scanned to identify the borderlines between the small pieces. Beads from each piece were split into four 50 uL PCR reactions that contains 25 uL of 2× Kapa HiFi Hotstart Readymix (KK2601, Kapabiosystems), 0.5 uL 100 uM SMRTper primer (AAGCAGTGGTATCAACGCAGAGT, IDT), and 24.5 uL of water. The mixtures were subjected to a PCR amplification protocol on a thermocycler (95° C. 3 minutes, 4 cycles of (98° C. 20 seconds, 65° C. 45 seconds, 72° C. 3 minutes), 8 cycles of (98° C. 20 seconds, 67° C. 20 seconds, 72° C. 3 minutes), 72° C. 5 minutes, hold at 4° C.). SMRT PCR product (supernatant only) of beads from each small piece were pooled together and purified using the SPRI paramagnetic bead technology (A63880, Beckman Coulter) with a 0.6:1 bead-to-sample volume ratio and eluted in 10 uL of nuclease free water. The purified products were then quantified by a fluorimeter.

Amplification and Sequencing of Tagmented cDNA

[0212] Purified product from each of the small piece was tagmented, barcoded, and amplified using a commercially available kit (Nextera XT, FC-131-1024, Illumina) per the vendor's instructions with the following modifications. First, 0.6 ng was used as input for each reaction. Second, a custom P5 primer (AATGATACGGCGACCACCGAGATCTACACGCCTGTCCGCGGAAGCAGTGGT ATCAACGCAGAGT*A*C, IDT) was used in the PCR amplification. The Nextera PCR products were then pooled and purified twice using the SPRI paramagnetic bead technology (A63880, Beckman Coulter) with a 0.6:1 and 1:1 bead-to-sample volume ratios in the first and second round of purification respectively. The purified Nextera PCR product was sequenced on a NextSeq 500 machine (Illumina) with a custom read 1 sequencing primer (GCCTGTCCGCGGAAGCAGTGGTATCAACGCAGAGTAC, IDT). 21 bases were sequenced on read 1 and 63 bases were sequenced on read 2. The raw fastq files generated by sequencers were processed to obtain a digital expression matrix where each column represents the expression profile of a cell and each row represents the expression level of a gene for cells from each of the small pieces. The look-up table generated in the bead synthesis step was then used to link each cell's imaging phenotype to sequencing barcode sequence of the bead that resided in the same well with the cell and the associated mRNA expression profile.

### Example 5

### Merged Barcode for Sequence/Microscope

[0213] In the dual barcode embodiment described in previous examples, the mRNA capture beads contain two barcodes. The first barcode (sequencing barcode) becomes associated with the cDNA library obtained from each individual cell and distinguishes the cDNA from each cell on the sequencer. The second barcode (optical barcode) is used to identify the same cell by imaging with a microscope. Having two separate barcodes requires two manufacturing steps to synthesize the beads. Having two separate barcodes also requires a separate sequencing experiment to determine which optical barcode is attached to each sequencing barcode, as these are associated randomly in the synthesis process. To avoid these complications, an embodiment is provided wherein the sequencing barcode and the optical barcode are merged into the same entity.

[0214] In the dual barcode embodiment described in previous examples, the optical barcode is attached to a subset of the mRNA capture sites (poly-dT sequences) on each bead. This reduces the number of sites available for mRNA capture and therefore efficiency. This problem is avoided by making the sequencing barcode and optical barcode the same entity, because the resulting merged barcode can be located upstream of the mRNA capture site and does not have to be attached to its 3′-end, which ablates its ability to prime cDNA synthesis.

[0215] In the dual barcode embodiment described in previous examples, because only a subset of mRNA capture sites on each bead can be occupied by an optical barcode, the fluorescence signal obtainable from the optical barcode is relatively low. The fluorescence signal is improved by making the sequencing barcode and optical barcode the same entity, since the resulting merged barcode can be located upstream of the mRNA capture site and 100% of oligonucleotides on the bead can contain an optical barcode.

[0216] The merged barcode permits a simpler manufacturing process for optically barcoded mRNA capture beads, yields higher signal-to-noise allowing use of simpler microscopy equipment, and provides higher-quality scRNA-seq data.

[0217] The merged barcodes can be characterized by three parameters: N, M, and L. Each merged barcode contains N oligonucleotide sequence blocks. There is a unique set of M oligonucleotide sequences, each of length L nucleotides for each of the N blocks. For each sequence block on each bead, an oligonucleotide sequence is selected from the corresponding set of M oligonucleotide sequences. For example, for a given bead, the oligonucleotide sequence of block 1 would be chosen from the first set of M oligonucleotide sequences and the oligonucleotide sequence of block 2 would be chosen from the second set of M oligonucleotide sequences, etc. In this way, one can combinatorially generate a set of MAN unique merged barcodes from M×N oligonucleotide sequences. For example, if M=100 and N=2, one could generate 100\hat{ }2=10,000 unique merged barcodes from 2 sets of 100 oligonucleotide sequences (M×N=100×2=200 total oligonucleotide sequences). If sequential fluorescence hybridization is to be used as a read-out, then it is convenient for all M×N oligonucleotide sequences to be unique. However, if sequencing is to be used as a read-out, then one could have, for example, identical sets of M oligonucleotide sequences for each block because the positional information afforded by sequencing could be used to distinguish the N oligonucleotide sequence blocks.

[0218] One approach to manufacturing beads conjugated to merged barcodes as described above is to use split-pool ligation of oligonucleotides. Consider the case that N=2 and M=96. One would purchase a 96-well plate of unique, 5′-phosphorylated oligonucleotides for each of the two sequence blocks in the barcode. One would then take beads conjugated to a universal oligonucleotide sequence adapter and add them to each well of the first 96-well plate along with reagents for DNA ligation (e.g., DNA ligase, an appropriate buffer, ATP). This set of 96 reactions would produce a library of beads conjugated to 96 different oligonucleotide sequences. Next, one would mix all of the beads from all 96 wells together in a single vessel and then add an equal proportion of the resulting pool to each of the 96 wells in the second plate of unique, 5′-phosphorylated oligonucleotides along with reagents for DNA ligation. At the end of this second reaction, one would again mix all of the beads from all 96 wells together in a single vessel. The second set of 96 reactions would produce a library of beads conjugated to 96\hat{ }2=9,216 unique merged barcodes.

[0219] A second approach to manufacturing beads conjugated to merged barcodes as described above is to use split-pool solid-phase oligonucleotide synthesis. Consider again the case that N=2 and M=96. One would take beads conjugated to a universal oligonucleotide sequence adapter and split them into 96 wells. One would then use solid-phase (e.g., phosphoramidite-based) oligonucleotide synthesis to synthesize a unique oligonucleotide sequence onto the end of the universal oligonucleotide sequence adapters on the beads in each well. This set of 96 reactions would produce a library of beads conjugated to 96 different oligonucleotide sequences. Next, one would mix all of the beads from all 96 wells together in a single vessel and then add an equal proportion of the resulting pool to each of the 96 wells in the second plate. In the second plate, one would again use solid-phase (e.g., phosphoramidite-based) oligonucleotide synthesis to synthesize a unique oligonucleotide sequence onto the end of the first barcode sequence block that had been added to each bead in the first plate. At the end of this second reaction, one would again mix all of the beads from all 96 wells together in a single vessel. The second set of 96 reactions would produce a library of beads conjugated to 96\hat{ }2=9,216 unique merged barcodes.

[0220] FIG. 22 shows the simplified design of the optically barcoded mRNA capture beads for the merged barcode. Unlike the previously-described dual barcode embodiments, there is only one cell-identifying barcode located upstream of the oligo(dT) mRNA capture site. This merged barcode contains a unique combination of multiple sequence blocks.

[0221] As illustrated in FIG. 22, we have N sets of M DNA sequences from which the N sequence blocks on each bead are generated, and one DNA sequence from each set is concatenated to form a unique barcode for each bead. For example, if there were three sets of 24 DNA sequences, one could generate 243=13,824 unique barcodes. These barcodes can be demultiplexed optically using sequential fluorescence hybridization just as in the previous implementation with a few practical modifications.

[0222] FIG. 23 illustrates an approach for optical demultiplexing of the beads illustrated in FIG. 22. In this scheme, the barcode is comprised of three concatenated sequence blocks (so N=3) and there are four sequences in each block (so M=4). For each of the three blocks, we introduce two mixtures of two probes to identify which of the four sequences are present in the block. For example, for the first block, first a mixture is introduced containing fluorescent probes that are complementary to sequences 1 and 2. Then a mixture is introduced containing fluorescent probes that are complementary to sequences 1 and 3. If sequence 3 is actually present on the bead, then the first mixture will give a negative result and the second will give a positive result. This outcome is unique to a bead harboring sequence 3 in its first block. This procedure is then repeat to identify the sequences in the remaining two blocks.

[0223] Optical demultiplexing of beads with the barcode format described in FIG. 22 and the readout method schematized in FIG. 23 is demonstrated. This approach avoids fluorescently labeling the large number of complementary probes directly. Instead, a universal sequence is included attached to each complementary probe that hybridizes to a universal fluorescently labeled oligonucleotide. This allows use of the same fluorescently labeled oligonucleotide to make all of the complementary probes fluorescent, which is highly cost effective. A representative image of fluorescence-based demultiplexing of a subset of the beads appears in FIG. 24.

[0224] In the experiment that generated FIG. 24, barcoded beads with M=2 and N=3 were used. Initially followed is the microwell array-based single-cell RNA-Seq workflow described in Yuan and Sims, Scientific Reports 6, 33883, until the on-chip reverse transcription step. After the on-chip reverse transcription step, exonuclease I digestion reaction mix (1×Exo I buffer, 1 U/uL Exo I) is flowed in, and the device is incubated in a 37° C. incubator for 45 minutes. This step removes unused single-stranded capture primers that were accessible to enzymatic digestion. The device was then washed by TE/TW buffer (10 mM Tris pH8.0, 1 mM EDTA, 0.01% Tween-20). A hybridization mix (200 nM primary probe oligo, 20 mM Tris-HCl pH 7.9, 50 mM NaCl, 0.1% Tween-20) was subsequently flowed into the device and incubated for 10 minutes. The primary probe oligo is an unlabeled oligo whose sequence can be divided into two parts. One part of the oligo's sequence is complimentary to the first of the first set of two oligo sequences on the bead. The other part's sequence is complimentary to a fluorescently labeled oligo which we call read-out probe. The device is then washed with wash buffer (20 mM Tris-HCl pH7.9, 50 mM NaCl, 0.1% Tween-20) to remove any unbound oligos. The read-out probe mix (200 nM read-out probe oligo, 20 mM Tris-HCl pH 7.9, 50 mM NaCl, 0.1% Tween-20) was then flowed into the device and incubated for 10 minutes. Unbound oligos were washed out by wash buffer afterwards. The device is then scanned under a microscope through both bright field and fluorescence channel which generated images like the ones shown in FIG. 24. Beads were then extracted from the device, washed with 150 mM NaOH, pooled together for subsequent tube-based library construction steps as described previously in Yuan and Sims (2016), Scientific Reports 6, 33883.

Merged Barcode mRNA Capture Beads (M=2, N=2)

[0225] To test the merged optical barcode scheme (SCOPE-seqV2), a small-scale pool of optically barcoded mRNA capture beads were designed with two concatenated sequence blocks (N=2) with two sequences in each block (M=2). The sequence in each block was eight bases long. This results in a total of four (22=4) different bead species in the bead pool. The performance of these beads was characterized in 1) a single cell RNA-Seq experiment and 2) a fluorescence hybridization experiment.

[0226] In the single cell RNA-Seq experiment, merged optically barcoded mRNA capture beads (referred as SCOPE-SeqV2 beads) and non-optically barcoded mRNA capture beads (referred as conventional RNA-seq beads) were used to perform single cell RNA-Seq in two separate microwell array devices on approximately (<20% difference) the same number of cells sampled from the same batch of cell culture using the protocol described in Yuan et al, Scientific Reports, 2016. Pre-amplified cDNA from both experiments were quantified by fluorometer (Qubit) and capillary gel electrophoresis (Bioanalyzer, Agilent). The amount of cDNA yield and cDNA length distribution were essentially identical for cDNA obtained using both types of beads (see FIG. 25). This observation suggests that capture efficiency for single-cell RNA-seq is uncompromised by this merged optical barcoding embodiment.

[0227] In the fluorescence hybridization experiment, exonuclease-treated SCOPE-SeqV2 beads were loaded into a microwell array device. A Cy3 dye-labeled 8-mer oligonucleotide whose sequence is complimentary to one of the two sequences in the first sequence block and Cy5 dye-labeled 8-mer oligonucleotide whose sequence is complimentary to one of the two sequences in the second sequence block were simultaneously hybridized to the beads in the microwell array device. Both oligonucleotides were introduced at a concentration of 100 nM in a hybridization buffer comprised of 2×SSC (Saline Sodium Citrate) with 10% DMSO (Dimethyl sulfoxide) and an incubation time of 10 minutes. Next, excess oligonucleotides were rinsed out of the device by laminar flow of buffer. Beads in microwell array device were then imaged in the Cy3 and Cy5 excitation/emission channels with an epifluorescence microscope, and a bright field transmission image was also acquired. A multi-color composite image of the beads (FIG. 26) clearly shows that there are four optically distinct bead species (pseudo-colored as black, green, orange, and red). A scatter plot of the log 2 transformed average bead intensity in the Cy3 and Cy5 channels (FIG. 27) demonstrates high signal-to-background ratio. Four bead populations can be readily detected.

### Design Considerations for Merged Barcode Beads

[0228] In one embodiment, the length of the sequence in each merged optical barcode sequence block is long enough for stable oligonucleotide hybridization at room temperature but not too long to minimize DNA secondary structure. The formation of DNA secondary structure significantly compromises the quality of scRNA-Seq data and fluorescence hybridization-based optical demultiplexing. Typically, fluorescence probes with a length between 16 nt and 22 nt are used in fluorescence hybridization-based applications including single molecule fluorescence in situ hybridization. However, when 16 nt oligonucleotides were used in each optical barcode sequence block, scRNA-Seq data and optical demultiplexing were both significantly adversely affected. When 8 nt oligonucleotides were used in each optical barcode sequence block, uncompromised scRNA-Seq data (compared to conventional RNA-seq beads) and fluorescence hybridization signal with high signal-to-background ratio were obtained. Therefore, the length of optical barcode sequence in each block was set to be 8 nt.

[0229] To distinguish different optical barcode sequences using fluorescence hybridization, a preliminary list of 8-mer sequences was generated that are at least 3 Levenshtein distance away from each other. Any sequences that contain 3-base homopolymers or whose GC content is either <40% or >60%, or are perfectly self-complementary were filtered out. This constrains the oligonucleotide sequence space to 547 8-mer sequences (out of a possible 4\hat{ }8=65,536).

[0230] A preliminary list of full-length mRNA capture oligonucleotide sequences was then generated by combinatorically arranging these 8-mer sequences in two optical barcode oligonucleotide sequence blocks separated by two random unique molecular identifier (UMI) bases. The composition of the full-length sequence is as follows:

TTTTTTTAAGCAGTGGTATCAACGCAGAGTACNN(8-mer Block 1)
NN(8-mer Block 2)NNTTTTTTTTTTTTTTTTTTTTTTTTTTTTTT

[0231] The maximum length of continuous self-complimentary sequences within each full-length mRNA capture oligonucleotide sequence is calculated. The stability score of such self-complimentary structure is defined as 1.5*L_{GC}+L_{AT}. wherein L_{GC} and L_{AT} are the number of GC bases and AT bases respectively in the continuous stretch of self-complimentary sequence. The individual 8-mer sequences were then ranked in ascending order by the sum of the stability score of all full-length sequences of which it was a member. The bottom 50% of the 8-mer sequences on this ranked list was filtered out leaving 274 8-mer sequences.

[0232] Another round of filtering is performed on this list based on the melting temperature and self-dimer or cross-dimer forming potential. Any 8-mer sequences with a predicted melting temperature below 25° C. or a strong tendency to form self-dimer or cross-dimer were excluded. 11 and 17 8-mer sequences were filtered out due to low melting temperature and strong potential to form self-dimer or cross-dimer respectively leaving 246 8-mer sequences (see attached sequence listing).

[0233] The 8-mer sequences also need to be highly distinct from the universal sequence adapters at the base of each bead (TTTTTTTAAGCAGTGGTATCAACGCAGAGTAC). The local alignment scores between all remaining 8-mer sequences and the universal sequence were calculated. The remaining 8-mer sequences were then ranked based on this local alignment score in ascending order. The top 96 8-mer sequences were used in the first optical barcode oligonucleotide sequence block. The 97^{th} to 192^{nd} 8-mer sequences were used in the second optical barcode oligonucleotide sequence block. A final list of 9216 full-length mRNA capture oligonucleotide sequences was then generated (see attached sequence listing).

1.-40. (canceled)

41. A plurality of oligonucleotide capture beads, each capture bead comprising a plurality of oligonucleotide sequences attached thereto, wherein each oligonucleotide sequence comprises:
(a) a PCR handle identical in each oligonucleotide sequence on each capture bead;
(b) a barcode configured for identification of the attached capture bead and an associated cell, wherein the barcode comprises N blocks, wherein each block is an oligonucleotide sequence of length 8 nt to 30 nt chosen from one of N unique sets of M oligonucleotides, wherein N is at least 2 and M is at least 30, wherein said barcode is identifiable by sequential fluorescence hybridization;
(c) a unique molecular identifier (UMI) of length 6 to 16 nucleotides (nt); and
(d) an oligo(dT).

42. The plurality of oligonucleotide capture beads of claim 41, wherein N is 2 and M is 96.

43. The plurality of oligonucleotide capture beads of claim 41, wherein the UMI is of length 6 nt to 10 nt.

44. The plurality of oligonucleotide capture beads of claim 41, wherein the UMI is of length 6 nt.

45. The plurality of oligonucleotide capture beads of claim 41, wherein N is 2 and M is 96 and the oligonucleotide sequences are set forth in SEQ ID NO: 248 through SEQ ID NO: 9463.

46. A method for single cell RNA capture and sequencing library preparation, for linking sequence data acquired from the library to cell imaging data, wherein said method comprises
(a) introducing into a plurality of microwells at least one cell and one capture bead, wherein the microwells are formed from a first substrate that faces a second substrate, wherein the capture bead comprises a plurality of oligonucleotide sequences attached thereto, and wherein each oligonucleotide sequence comprises:
i. a PCR handle identical in each oligonucleotide sequence on each capture bead,
ii. a barcode configured for identification of the attached capture bead and an associated cell, wherein the barcode comprises N blocks, wherein each block is an oligonucleotide sequence of length 8 nt to 30 nt chosen from one of N unique sets of M oligonucleotide sequences, wherein N is at least 2 and M is at least 30, wherein said barcode is identifiable by sequential fluorescence hybridization;
iii. a unique molecular identifier (UMI) of length 6 to 16 nucleotides (nt); and
iv. an oligo(dT);
(b) adding a lysis buffer to the microwells, capturing RNA from said at least one cell onto the capture bead, and reverse transcribing; and
(c) demultiplexing optically the capture bead barcodes using sequential fluorescence hybridization, wherein the sequential fluorescence hybridization comprises sequentially introducing mixtures of fluorescently labeled oligonucleotide probes into the microwells, wherein:
i. each of said probes is complementary to one of the M unique sequences,
ii. said mixtures comprise at least two probes complementary to the M unique sequences within any one N block, and
iii. the fluorescent label for each of said probes complementary to the M unique sequences within any N block is a universal fluorescently labeled oligonucleotide hybridized to a universal sequence included in said probes,
wherein a direct association is provided between phenotypic imaging information acquired from the single cells while located within the microwell and sequence data acquired from the captured and reverse transcribed cellular mRNA.

47. The method of claim 46, wherein said first and/or second substrates are polysiloxane substrates.

48. The method of claim 47, wherein the first and second substrates are PDMS substrates.

49.-50. (canceled)

51. A device for single cell RNA capture and sequencing library preparation, for linking sequence data acquired from the library to cell imaging data, wherein said device comprises:
(a) a plurality of capture beads, each bead comprising a plurality of oligonucleotide sequences attached thereto, wherein each oligonucleotide sequence comprises:
i. a PCR handle identical in each oligonucleotide sequence on each capture bead,
ii. a barcode configured for identification of the attached capture bead and an associated cell, wherein the barcode comprises N blocks, wherein each block is an oligonucleotide sequence of length 8 nt to 30 nt chosen from one of N unique sets of M oligonucleotide sequences, wherein N is at least 2 and M is at least 30, wherein said barcode is identifiable by sequential fluorescence hybridization;
iii. a unique molecular identifier (UMI) of length 6 to 16 nucleotides (nt); and
iv. an oligo(dT);
(b) a first substrate comprising a plurality of microwells; and
(c) a second substrate that faces said first substrate, wherein individual capture beads are distributed in individual microwells.

52. The device of claim 51, wherein the first and/or second substrates are polysiloxane substrates.

53. The device of claim 52, wherein the first and second substrates are PDMS substrates.

54. (canceled)

55. The device of claim 51, wherein N is 2 and M is 96.

56. The device of claim 51, wherein the UMI is of length 6 nt.

57. The device of claim 51, wherein N is 2 and M is 96 and the oligonucleotide sequences are set forth in SEQ ID NO: 248 through SEQ ID NO: 9463.

58. The method of claim 46, wherein N is 2 and M is 96.

59. The method of claim 46, wherein the UMI is of length 6 nt.

60. The method of claim 46, wherein N is 2 and M is 96 and the oligonucleotide sequences are set forth in SEQ ID NO: 248 through SEQ ID NO: 9463

The application's sequence listing, which the Patent Office published only in electronic form, follows.

SEQUENCE LISTING (9463 sequences)

SEQ ID NO: 1 - DNA, 8 bp, Artificial
  Barcode component
gattggag

SEQ ID NO: 2 - DNA, 8 bp, Artificial
  Barcode component
gattggag

SEQ ID NO: 3 - DNA, 8 bp, Artificial
  Barcode component
ggatgaag

SEQ ID NO: 4 - DNA, 8 bp, Artificial
  Barcode component
tggaggat

SEQ ID NO: 5 - DNA, 8 bp, Artificial
  Barcode component
aggtaagg

SEQ ID NO: 6 - DNA, 8 bp, Artificial
  Barcode component
ggaacttg

SEQ ID NO: 7 - DNA, 8 bp, Artificial
  Barcode component
ggttagtg

SEQ ID NO: 8 - DNA, 8 bp, Artificial
  Barcode component
ggagttag

SEQ ID NO: 9 - DNA, 8 bp, Artificial
  Barcode component
tgtgtgtg

SEQ ID NO: 10 - DNA, 8 bp, Artificial
  Barcode component
tggcctaa

SEQ ID NO: 11 - DNA, 8 bp, Artificial
  Barcode component
tcggacaa

SEQ ID NO: 12 - DNA, 8 bp, Artificial
  Barcode component
attgtccg

SEQ ID NO: 13 - DNA, 8 bp, Artificial
  Barcode component
tgtccgat

SEQ ID NO: 14 - DNA, 8 bp, Artificial
  Barcode component
gctattcg

SEQ ID NO: 15 - DNA, 8 bp, Artificial
  Barcode component
agcctaac

SEQ ID NO: 16 - DNA, 8 bp, Artificial
  Barcode component
gcctatct

SEQ ID NO: 17 - DNA, 8 bp, Artificial
  Barcode component
tggtgaga

SEQ ID NO: 18 - DNA, 8 bp, Artificial
  Barcode component
cgatctag

SEQ ID NO: 19 - DNA, 8 bp, Artificial
  Barcode component
gtgtatgg

SEQ ID NO: 20 - DNA, 8 bp, Artificial
  Barcode component
ccggttaa

SEQ ID NO: 21 - DNA, 8 bp, Artificial
  Barcode component
ttgttcgg

SEQ ID NO: 22 - DNA, 8 bp, Artificial
  Barcode component
gatcttgg

SEQ ID NO: 23 - DNA, 8 bp, Artificial
  Barcode component
gtgaggaa

SEQ ID NO: 24 - DNA, 8 bp, Artificial
  Barcode component
aggagatg

SEQ ID NO: 25 - DNA, 8 bp, Artificial
  Barcode component
aaggccta

SEQ ID NO: 26 - DNA, 8 bp, Artificial
  Barcode component
cgtaatcg

SEQ ID NO: 27 - DNA, 8 bp, Artificial
  Barcode component
tgagaagg

SEQ ID NO: 28 - DNA, 8 bp, Artificial
  Barcode component
gtcgatgt

SEQ ID NO: 29 - DNA, 8 bp, Artificial
  Barcode component
gaaggact

SEQ ID NO: 30 - DNA, 8 bp, Artificial
  Barcode component
gtagacct

SEQ ID NO: 31 - DNA, 8 bp, Artificial
  Barcode component
caattggc

SEQ ID NO: 32 - DNA, 8 bp, Artificial
  Barcode component
tcgaatgg

SEQ ID NO: 33 - DNA, 8 bp, Artificial
  Barcode component
aaggtgca

SEQ ID NO: 34 - DNA, 8 bp, Artificial
  Barcode component
acgatcga

SEQ ID NO: 35 - DNA, 8 bp, Artificial
  Barcode component
agaatcgg

SEQ ID NO: 36 - DNA, 8 bp, Artificial
  Barcode component
ggaatgga

SEQ ID NO: 37 - DNA, 8 bp, Artificial
  Barcode component
ccgtattg

SEQ ID NO: 38 - DNA, 8 bp, Artificial
  Barcode component
aaggaggt

SEQ ID NO: 39 - DNA, 8 bp, Artificial
  Barcode component
ctggaatg

SEQ ID NO: 40 - DNA, 8 bp, Artificial
  Barcode component
acgacttg

SEQ ID NO: 41 - DNA, 8 bp, Artificial
  Barcode component
gttcgaga

SEQ ID NO: 42 - DNA, 8 bp, Artificial
  Barcode component
tcctaggt

SEQ ID NO: 43 - DNA, 8 bp, Artificial
  Barcode component
gatgacga

SEQ ID NO: 44 - DNA, 8 bp, Artificial
  Barcode component
atgtcgag

SEQ ID NO: 45 - DNA, 8 bp, Artificial
  Barcode component
aacgtgtc

SEQ ID NO: 46 - DNA, 8 bp, Artificial
  Barcode component
ggtcagaa

SEQ ID NO: 47 - DNA, 8 bp, Artificial
  Barcode component
gagtcgat

SEQ ID NO: 48 - DNA, 8 bp, Artificial
  Barcode component
gatggtgt

SEQ ID NO: 49 - DNA, 8 bp, Artificial
  Barcode component
agaaggtc

SEQ ID NO: 50 - DNA, 8 bp, Artificial
  Barcode component
aggatgac

SEQ ID NO: 51 - DNA, 8 bp, Artificial
  Barcode component
ggtaggta

SEQ ID NO: 52 - DNA, 8 bp, Artificial
  Barcode component
gacaagtg

SEQ ID NO: 53 - DNA, 8 bp, Artificial
  Barcode component
taggaagc

SEQ ID NO: 54 - DNA, 8 bp, Artificial
  Barcode component
ttcaggag

SEQ ID NO: 55 - DNA, 8 bp, Artificial
  Barcode component
gtcatagg

SEQ ID NO: 56 - DNA, 8 bp, Artificial
  Barcode component
gaacggaa

SEQ ID NO: 57 - DNA, 8 bp, Artificial
  Barcode component
aatggacg

SEQ ID NO: 58 - DNA, 8 bp, Artificial
  Barcode component
atcggaag

SEQ ID NO: 59 - DNA, 8 bp, Artificial
  Barcode component
aagacgga

SEQ ID NO: 60 - DNA, 8 bp, Artificial
  Barcode component
actaaccg

SEQ ID NO: 61 - DNA, 8 bp, Artificial
  Barcode component
gtgcacaa

SEQ ID NO: 62 - DNA, 8 bp, Artificial
  Barcode component
cctatcca

SEQ ID NO: 63 - DNA, 8 bp, Artificial
  Barcode component
cttggaca

SEQ ID NO: 64 - DNA, 8 bp, Artificial
  Barcode component
tggtcaag

SEQ ID NO: 65 - DNA, 8 bp, Artificial
  Barcode component
gaatgagc

SEQ ID NO: 66 - DNA, 8 bp, Artificial
  Barcode component
gaggagaa

SEQ ID NO: 67 - DNA, 8 bp, Artificial
  Barcode component
gagatggt

SEQ ID NO: 68 - DNA, 8 bp, Artificial
  Barcode component
gaagtagg

SEQ ID NO: 69 - DNA, 8 bp, Artificial
  Barcode component
cggcatat

SEQ ID NO: 70 - DNA, 8 bp, Artificial
  Barcode component
cggaagaa

SEQ ID NO: 71 - DNA, 8 bp, Artificial
  Barcode component
attggtgc

SEQ ID NO: 72 - DNA, 8 bp, Artificial
  Barcode component
ggtggatt

SEQ ID NO: 73 - DNA, 8 bp, Artificial
  Barcode component
ggctaaga

SEQ ID NO: 74 - DNA, 8 bp, Artificial
  Barcode component
ttagaggc

SEQ ID NO: 75 - DNA, 8 bp, Artificial
  Barcode component
ccattgtg

SEQ ID NO: 76 - DNA, 8 bp, Artificial
  Barcode component
cgagattg

SEQ ID NO: 77 - DNA, 8 bp, Artificial
  Barcode component
tgtggaag

SEQ ID NO: 78 - DNA, 8 bp, Artificial
  Barcode component
tcttgtgg

SEQ ID NO: 79 - DNA, 8 bp, Artificial
  Barcode component
ccttcaga

SEQ ID NO: 80 - DNA, 8 bp, Artificial
  Barcode component
cctcatgt

SEQ ID NO: 81 - DNA, 8 bp, Artificial
  Barcode component
ggagtgtt

SEQ ID NO: 82 - DNA, 8 bp, Artificial
  Barcode component
gaagatcc

SEQ ID NO: 83 - DNA, 8 bp, Artificial
  Barcode component
agtggaga

SEQ ID NO: 84 - DNA, 8 bp, Artificial
  Barcode component
tagtagcc

SEQ ID NO: 85 - DNA, 8 bp, Artificial
  Barcode component
gagatcag

SEQ ID NO: 86 - DNA, 8 bp, Artificial
  Barcode component
tgaaggca

SEQ ID NO: 87 - DNA, 8 bp, Artificial
  Barcode component
tccgatga

SEQ ID NO: 88 - DNA, 8 bp, Artificial
  Barcode component
acgaatcc

SEQ ID NO: 89 - DNA, 8 bp, Artificial
  Barcode component
taagaccg

SEQ ID NO: 90 - DNA, 8 bp, Artificial
  Barcode component
tctatggc

SEQ ID NO: 91 - DNA, 8 bp, Artificial
  Barcode component
caaggatg

SEQ ID NO: 92 - DNA, 8 bp, Artificial
  Barcode component
tcagaacc

SEQ ID NO: 93 - DNA, 8 bp, Artificial
  Barcode component
tcatgtcc

SEQ ID NO: 94 - DNA, 8 bp, Artificial
  Barcode component
acaagacc

SEQ ID NO: 95 - DNA, 8 bp, Artificial
  Barcode component
gttagacg

SEQ ID NO: 96 - DNA, 8 bp, Artificial
  Barcode component
ctggtgta

SEQ ID NO: 97 - DNA, 8 bp, Artificial
  Barcode component
tagacgac

SEQ ID NO: 98 - DNA, 8 bp, Artificial
  Barcode component
aatcggca

SEQ ID NO: 99 - DNA, 8 bp, Artificial
  Barcode component
tacggcat

SEQ ID NO: 100 - DNA, 8 bp, Artificial
  Barcode component
ttggatcg

SEQ ID NO: 101 - DNA, 8 bp, Artificial
  Barcode component
tggaacga

SEQ ID NO: 102 - DNA, 8 bp, Artificial
  Barcode component
ggcaatca

SEQ ID NO: 103 - DNA, 8 bp, Artificial
  Barcode component
gaatccga

SEQ ID NO: 104 - DNA, 8 bp, Artificial
  Barcode component
ttacggtg

SEQ ID NO: 105 - DNA, 8 bp, Artificial
  Barcode component
catatcgg

SEQ ID NO: 106 - DNA, 8 bp, Artificial
  Barcode component
cttcggta

SEQ ID NO: 107 - DNA, 8 bp, Artificial
  Barcode component
tcctaacg

SEQ ID NO: 108 - DNA, 8 bp, Artificial
  Barcode component
gtaagcca

SEQ ID NO: 109 - DNA, 8 bp, Artificial
  Barcode component
taaggtgg

SEQ ID NO: 110 - DNA, 8 bp, Artificial
  Barcode component
ggtaagct

SEQ ID NO: 111 - DNA, 8 bp, Artificial
  Barcode component
tgtgtcga

SEQ ID NO: 112 - DNA, 8 bp, Artificial
  Barcode component
gagcatga

SEQ ID NO: 113 - DNA, 8 bp, Artificial
  Barcode component
tcgaagtc

SEQ ID NO: 114 - DNA, 8 bp, Artificial
  Barcode component
ggtgaaca

SEQ ID NO: 115 - DNA, 8 bp, Artificial
  Barcode component
acatgcac

SEQ ID NO: 116 - DNA, 8 bp, Artificial
  Barcode component
ccaacagt

SEQ ID NO: 117 - DNA, 8 bp, Artificial
  Barcode component
agaacagc

SEQ ID NO: 118 - DNA, 8 bp, Artificial
  Barcode component
gaacacgt

SEQ ID NO: 119 - DNA, 8 bp, Artificial
  Barcode component
ggtcttca

SEQ ID NO: 120 - DNA, 8 bp, Artificial
  Barcode component
aggttcag

SEQ ID NO: 121 - DNA, 8 bp, Artificial
  Barcode component
ctagagca

SEQ ID NO: 122 - DNA, 8 bp, Artificial
  Barcode component
cttctagc

SEQ ID NO: 123 - DNA, 8 bp, Artificial
  Barcode component
gagtaacg

SEQ ID NO: 124 - DNA, 8 bp, Artificial
  Barcode component
ctaagagg

SEQ ID NO: 125 - DNA, 8 bp, Artificial
  Barcode component
acgtgtag

SEQ ID NO: 126 - DNA, 8 bp, Artificial
  Barcode component
actacagg

SEQ ID NO: 127 - DNA, 8 bp, Artificial
  Barcode component
tacaggtc

SEQ ID NO: 128 - DNA, 8 bp, Artificial
  Barcode component
ctcacatg

SEQ ID NO: 129 - DNA, 8 bp, Artificial
  Barcode component
actaggag

SEQ ID NO: 130 - DNA, 8 bp, Artificial
  Barcode component
ccatagga

SEQ ID NO: 131 - DNA, 8 bp, Artificial
  Barcode component
ggagaatc

SEQ ID NO: 132 - DNA, 8 bp, Artificial
  Barcode component
gccaagaa

SEQ ID NO: 133 - DNA, 8 bp, Artificial
  Barcode component
aaggcaag

SEQ ID NO: 134 - DNA, 8 bp, Artificial
  Barcode component
aatgtcgc

SEQ ID NO: 135 - DNA, 8 bp, Artificial
  Barcode component
atggaacc

SEQ ID NO: 136 - DNA, 8 bp, Artificial
  Barcode component
agaggcat

SEQ ID NO: 137 - DNA, 8 bp, Artificial
  Barcode component
tgcatagc

SEQ ID NO: 138 - DNA, 8 bp, Artificial
  Barcode component
ctaacgga

SEQ ID NO: 139 - DNA, 8 bp, Artificial
  Barcode component
tatcgagg

SEQ ID NO: 140 - DNA, 8 bp, Artificial
  Barcode component
catagcct

SEQ ID NO: 141 - DNA, 8 bp, Artificial
  Barcode component
atcgagac

SEQ ID NO: 142 - DNA, 8 bp, Artificial
  Barcode component
ggaagagt

SEQ ID NO: 143 - DNA, 8 bp, Artificial
  Barcode component
ccaagtag

SEQ ID NO: 144 - DNA, 8 bp, Artificial
  Barcode component
ctgaacag

SEQ ID NO: 145 - DNA, 8 bp, Artificial
  Barcode component
gtaggttc

SEQ ID NO: 146 - DNA, 8 bp, Artificial
  Barcode component
gtatggac

SEQ ID NO: 147 - DNA, 8 bp, Artificial
  Barcode component
tcgcaaca

SEQ ID NO: 148 - DNA, 8 bp, Artificial
  Barcode component
ccgctaat

SEQ ID NO: 149 - DNA, 8 bp, Artificial
  Barcode component
gattcgca

SEQ ID NO: 150 - DNA, 8 bp, Artificial
  Barcode component
cgatggaa

SEQ ID NO: 151 - DNA, 8 bp, Artificial
  Barcode component
agcaagga

SEQ ID NO: 152 - DNA, 8 bp, Artificial
  Barcode component
cgtagcaa

SEQ ID NO: 153 - DNA, 8 bp, Artificial
  Barcode component
tggcagta

SEQ ID NO: 154 - DNA, 8 bp, Artificial
  Barcode component
cggtagtt

SEQ ID NO: 155 - DNA, 8 bp, Artificial
  Barcode component
tgacttcg

SEQ ID NO: 156 - DNA, 8 bp, Artificial
  Barcode component
gagtgcaa

SEQ ID NO: 157 - DNA, 8 bp, Artificial
  Barcode component
acggtaac

SEQ ID NO: 158 - DNA, 8 bp, Artificial
  Barcode component
aagtggtg

SEQ ID NO: 159 - DNA, 8 bp, Artificial
  Barcode component
ggagacaa

SEQ ID NO: 160 - DNA, 8 bp, Artificial
  Barcode component
tcaaggac

SEQ ID NO: 161 - DNA, 8 bp, Artificial
  Barcode component
aagagagc

SEQ ID NO: 162 - DNA, 8 bp, Artificial
  Barcode component
cgagagat

SEQ ID NO: 163 - DNA, 8 bp, Artificial
  Barcode component
acagatgg

SEQ ID NO: 164 - DNA, 8 bp, Artificial
  Barcode component
aggagtca

SEQ ID NO: 165 - DNA, 8 bp, Artificial
  Barcode component
cgtgttac

SEQ ID NO: 166 - DNA, 8 bp, Artificial
  Barcode component
tagtgtgc

SEQ ID NO: 167 - DNA, 8 bp, Artificial
  Barcode component
ctcatgac

SEQ ID NO: 168 - DNA, 8 bp, Artificial
  Barcode component
gtatccag

SEQ ID NO: 169 - DNA, 8 bp, Artificial
  Barcode component
acgcctat

SEQ ID NO: 170 - DNA, 8 bp, Artificial
  Barcode component
aacgacct

SEQ ID NO: 171 - DNA, 8 bp, Artificial
  Barcode component
atcaggct

SEQ ID NO: 172 - DNA, 8 bp, Artificial
  Barcode component
caagttcg

SEQ ID NO: 173 - DNA, 8 bp, Artificial
  Barcode component
tagccaga

SEQ ID NO: 174 - DNA, 8 bp, Artificial
  Barcode component
caatcacg

SEQ ID NO: 175 - DNA, 8 bp, Artificial
  Barcode component
gcaacaag

SEQ ID NO: 176 - DNA, 8 bp, Artificial
  Barcode component
cacgacaa

SEQ ID NO: 177 - DNA, 8 bp, Artificial
  Barcode component
tacggaga

SEQ ID NO: 178 - DNA, 8 bp, Artificial
  Barcode component
cgacaaga

SEQ ID NO: 179 - DNA, 8 bp, Artificial
  Barcode component
cgaagtga

SEQ ID NO: 180 - DNA, 8 bp, Artificial
  Barcode component
agctggta

SEQ ID NO: 181 - DNA, 8 bp, Artificial
  Barcode component
aactaggc

SEQ ID NO: 182 - DNA, 8 bp, Artificial
  Barcode component
cagcaagt

SEQ ID NO: 183 - DNA, 8 bp, Artificial
  Barcode component
acgaggta

SEQ ID NO: 184 - DNA, 8 bp, Artificial
  Barcode component
catcttcc

SEQ ID NO: 185 - DNA, 8 bp, Artificial
  Barcode component
cctgaatc

SEQ ID NO: 186 - DNA, 8 bp, Artificial
  Barcode component
tgcagact

SEQ ID NO: 187 - DNA, 8 bp, Artificial
  Barcode component
agatgtgg

SEQ ID NO: 188 - DNA, 8 bp, Artificial
  Barcode component
agttcgac

SEQ ID NO: 189 - DNA, 8 bp, Artificial
  Barcode component
acaacctc

SEQ ID NO: 190 - DNA, 8 bp, Artificial
  Barcode component
catggtag

SEQ ID NO: 191 - DNA, 8 bp, Artificial
  Barcode component
cgtatctc

SEQ ID NO: 192 - DNA, 8 bp, Artificial
  Barcode component
cctagttc

SEQ ID NO: 193 - DNA, 8 bp, Artificial
  Barcode component
caagagtc

SEQ ID NO: 194 - DNA, 8 bp, Artificial
  Barcode component
aagcatcg

SEQ ID NO: 195 - DNA, 8 bp, Artificial
  Barcode component
gcagaaga

SEQ ID NO: 196 - DNA, 8 bp, Artificial
  Barcode component
caatgcca

SEQ ID NO: 197 - DNA, 8 bp, Artificial
  Barcode component
gcatcgaa

SEQ ID NO: 198 - DNA, 8 bp, Artificial
  Barcode component
aacgaagg

SEQ ID NO: 199 - DNA, 8 bp, Artificial
  Barcode component
caacatgg

SEQ ID NO: 200 - DNA, 8 bp, Artificial
  Barcode component
ttcagtgc

SEQ ID NO: 201 - DNA, 8 bp, Artificial
  Barcode component
ctaagtcc

SEQ ID NO: 202 - DNA, 8 bp, Artificial
  Barcode component
ccagacta

SEQ ID NO: 203 - DNA, 8 bp, Artificial
  Barcode component
gttcctac

SEQ ID NO: 204 - DNA, 8 bp, Artificial
  Barcode component
tgacgcaa

SEQ ID NO: 205 - DNA, 8 bp, Artificial
  Barcode component
cgcataag

SEQ ID NO: 206 - DNA, 8 bp, Artificial
  Barcode component
gcaggtaa

SEQ ID NO: 207 - DNA, 8 bp, Artificial
  Barcode component
acacaacg

SEQ ID NO: 208 - DNA, 8 bp, Artificial
  Barcode component
cacaggaa

SEQ ID NO: 209 - DNA, 8 bp, Artificial
  Barcode component
caggaaca

SEQ ID NO: 210 - DNA, 8 bp, Artificial
  Barcode component
gcaatgtc

SEQ ID NO: 211 - DNA, 8 bp, Artificial
  Barcode component
gcacagat

SEQ ID NO: 212 - DNA, 8 bp, Artificial
  Barcode component
acacgaga

SEQ ID NO: 213 - DNA, 8 bp, Artificial
  Barcode component
atccagtg

SEQ ID NO: 214 - DNA, 8 bp, Artificial
  Barcode component
acgtcagt

SEQ ID NO: 215 - DNA, 8 bp, Artificial
  Barcode component
gctagaac

SEQ ID NO: 216 - DNA, 8 bp, Artificial
  Barcode component
ctacgact

SEQ ID NO: 217 - DNA, 8 bp, Artificial
  Barcode component
gtagcagt

SEQ ID NO: 218 - DNA, 8 bp, Artificial
  Barcode component
ctagtggt

SEQ ID NO: 219 - DNA, 8 bp, Artificial
  Barcode component
cagagaag

SEQ ID NO: 220 - DNA, 8 bp, Artificial
  Barcode component
catcagag

SEQ ID NO: 221 - DNA, 8 bp, Artificial
  Barcode component
tcagagtg

SEQ ID NO: 222 - DNA, 8 bp, Artificial
  Barcode component
aacgctca

SEQ ID NO: 223 - DNA, 8 bp, Artificial
  Barcode component
tacaacgg

SEQ ID NO: 224 - DNA, 8 bp, Artificial
  Barcode component
tatcgcac

SEQ ID NO: 225 - DNA, 8 bp, Artificial
  Barcode component
cgaacaca

SEQ ID NO: 226 - DNA, 8 bp, Artificial
  Barcode component
ccatcaac

SEQ ID NO: 227 - DNA, 8 bp, Artificial
  Barcode component
ctcaacct

SEQ ID NO: 228 - DNA, 8 bp, Artificial
  Barcode component
tcgtagag

SEQ ID NO: 229 - DNA, 8 bp, Artificial
  Barcode component
tcacacac

SEQ ID NO: 230 - DNA, 8 bp, Artificial
  Barcode component
taaccgca

SEQ ID NO: 231 - DNA, 8 bp, Artificial
  Barcode component
tacgctgt

SEQ ID NO: 232 - DNA, 8 bp, Artificial
  Barcode component
cagctcaa

SEQ ID NO: 233 - DNA, 8 bp, Artificial
  Barcode component
gaagcaac

SEQ ID NO: 234 - DNA, 8 bp, Artificial
  Barcode component
tcagtgga

SEQ ID NO: 235 - DNA, 8 bp, Artificial
  Barcode component
ttaacgcg

SEQ ID NO: 236 - DNA, 8 bp, Artificial
  Barcode component
caacgaac

SEQ ID NO: 237 - DNA, 8 bp, Artificial
  Barcode component
tcacgaag

SEQ ID NO: 238 - DNA, 8 bp, Artificial
  Barcode component
cgcatgta

SEQ ID NO: 239 - DNA, 8 bp, Artificial
  Barcode component
cggtatca

SEQ ID NO: 240 - DNA, 8 bp, Artificial
  Barcode component
cttcaacg

SEQ ID NO: 241 - DNA, 8 bp, Artificial
  Barcode component
cagaatgc

SEQ ID NO: 242 - DNA, 8 bp, Artificial
  Barcode component
gtcaacga

SEQ ID NO: 243 - DNA, 8 bp, Artificial
  Barcode component
gctacaca

SEQ ID NO: 244 - DNA, 8 bp, Artificial
  Barcode component
gcattggt

SEQ ID NO: 245 - DNA, 8 bp, Artificial
  Barcode component
caagcaga

SEQ ID NO: 246 - DNA, 8 bp, Artificial
  Barcode component
acgcagaa

SEQ ID NO: 247 - DNA, 8 bp, Artificial
  Barcode component
acaacgca

SEQ ID NO: 248 - DNA, 84 bp, Artificial
  Barcode component
  misc_feature (33)..(34): n is a, c, g, or t
  misc_feature (43)..(44): n is a, c, g, or t
  misc_feature (53)..(54): n is a, c, g, or t
tttttttaagcagtggtatcaacgcagagtacnngattggagnnaatcggcanntttttttttttttttttttttttttttttt

SEQ ID NO: 249 - DNA, 84 bp, Artificial
  Barcode component
  misc_feature (33)..(34): n is a, c, g, or t
  misc_feature (43)..(44): n is a, c, g, or t
  misc_feature (53)..(54): n is a, c, g, or t
tttttttaagcagtggtatcaacgcagagtacnngattggagnntacggcatnntttttttttttttttttttttttttttttt

SEQ ID NO: 250 - DNA, 84 bp, Artificial Sequence
  Barcode component
  misc_feature (33)..(34): n is a, c, g, or t
  misc_feature (43)..(44): n is a, c, g, or t
  misc_feature (53)..(54): n is a, c, g, or t
tttttttaagcagtggtatcaacgcagagtacnngattggagnnttggatcgnntttttttttttttttttttttttttttttt

SEQ ID NO: 251 - DNA, 84 bp, Artificial
  Barcode component
  misc_feature (33)..(34): n is a, c, g, or t
  misc_feature (43)..(44): n is a, c, g, or t
  misc_feature (53)..(54): n is a, c, g, or t
tttttttaagcagtggtatcaacgcagagtacnngattggagnntggaacganntttttttttttttttttttttttttttttt

SEQ ID NO: 252 - DNA, 84 bp, Artificial
  Barcode component
  misc_feature (33)..(34): n is a, c, g, or t
  misc_feature (43)..(44): n is a, c, g, or t
  misc_feature (53)..(54): n is a, c, g, or t
tttttttaagcagtggtatcaacgcagagtacnngattggagnnggcaatcanntttttttttttttttttttttttttttttt

SEQ ID NO: 253 - DNA, 84 bp, Artificial
  Barcode component
  misc_feature (33)..(34): n is a, c, g, or t
  misc_feature (43)..(44): n is a, c, g, or t
  misc_feature (53)..(54): n is a, c, g, or t
tttttttaagcagtggtatcaacgcagagtacnngattggagnngaatccganntttttttttttttttttttttttttttttt

SEQ ID NO: 254 - DNA, 84 bp, Artificial
  Barcode component
  misc_feature (33)..(34): n is a, c, g, or t
  misc_feature (43)..(44): n is a, c, g, or t
  misc_feature (53)..(54): n is a, c, g, or t
tttttttaagcagtggtatcaacgcagagtacnngattggagnnttacggtgnntttttttttttttttttttttttttttttt

SEQ ID NO: 255 - DNA, 84 bp, Artificial
  Barcode component
  misc_feature (33)..(34): n is a, c, g, or t
  misc_feature (43)..(44): n is a, c, g, or t
  misc_feature (53)..(54): n is a, c, g, or t
tttttttaagcagtggtatcaacgcagagtacnngattggagnncatatcggnntttttttttttttttttttttttttttttt

SEQ ID NO: 256 - DNA, 84 bp, Artificial
  Barcode component
  misc_feature (33)..(34): n is a, c, g, or t
  misc_feature (43)..(44): n is a, c, g, or t
  misc_feature (53)..(54): n is a, c, g, or t
tttttttaagcagtggtatcaacgcagagtacnngattggagnncttcggtanntttttttttttttttttttttttttttttt

SEQ ID NO: 257 - DNA, 84 bp, Artificial
  Barcode component
  misc_feature (33)..(34): n is a, c, g, or t
  misc_feature (43)..(44): n is a, c, g, or t
  misc_feature (53)..(54): n is a, c, g, or t
tttttttaagcagtggtatcaacgcagagtacnngattggagnntcctaacgnntttttttttttttttttttttttttttttt

SEQ ID NO: 258 - DNA, 84 bp, Artificial
  Barcode component
  misc_feature (33)..(34): n is a, c, g, or t
  misc_feature (43)..(44): n is a, c, g, or t
  misc_feature (53)..(54): n is a, c, g, or t
tttttttaagcagtggtatcaacgcagagtacnngattggagnngtaagccanntttttttttttttttttttttttttttttt

SEQ ID NO: 259 - DNA, 84 bp, Artificial
  Barcode component
  misc_feature (33)..(34): n is a, c, g, or t
  misc_feature (43)..(44): n is a, c, g, or t
  misc_feature (53)..(54): n is a, c, g, or t
tttttttaagcagtggtatcaacgcagagtacnngattggagnntaaggtggnntttttttttttttttttttttttttttttt

SEQ ID NO: 260 - DNA, 84 bp, Artificial
  Barcode component
  misc_feature (33)..(34): n is a, c, g, or t
  misc_feature (43)..(44): n is a, c, g, or t
  misc_feature (53)..(54): n is a, c, g, or t
tttttttaagcagtggtatcaacgcagagtacnngattggagnnggtaagctnntttttttttttttttttttttttttttttt

SEQ ID NO: 261 - DNA, 84 bp, Artificial
  Barcode component
  misc_feature (33)..(34): n is a, c, g, or t
  misc_feature (43)..(44): n is a, c, g, or t
  misc_feature (53)..(54): n is a, c, g, or t
tttttttaagcagtggtatcaacgcagagtacnngattggagnntgtgtcganntttttttttttttttttttttttttttttt

SEQ ID NO: 262 - DNA, 84 bp, Artificial
  Barcode component
  misc_feature (33)..(34): n is a, c, g, or t
  misc_feature (43)..(44): n is a, c, g, or t
  misc_feature (53)..(54): n is a, c, g, or t
tttttttaagcagtggtatcaacgcagagtacnngattggagnngagcatganntttttttttttttttttttttttttttttt

SEQ ID NO: 263 - DNA, 84 bp, Artificial
  Barcode component
  misc_feature (33)..(34): n is a, c, g, or t
  misc_feature (43)..(44): n is a, c, g, or t
  misc_feature (53)..(54): n is a, c, g, or t
tttttttaagcagtggtatcaacgcagagtacnngattggagnntcgaagtcnntttttttttttttttttttttttttttttt

SEQ ID NO: 264 - DNA, 84 bp, Artificial
  Barcode component
  misc_feature (33)..(34): n is a, c, g, or t
  misc_feature (43)..(44): n is a, c, g, or t
  misc_feature (53)..(54): n is a, c, g, or t
tttttttaagcagtggtatcaacgcagagtacnngattggagnnggtgaacanntttttttttttttttttttttttttttttt

SEQ ID NO: 265 - DNA, 84 bp, Artificial
  Barcode component
  misc_feature (33)..(34): n is a, c, g, or t
  misc_feature (43)..(44): n is a, c, g, or t
  misc_feature (53)..(54): n is a, c, g, or t
tttttttaagcagtggtatcaacgcagagtacnngattggagnnacatgcacnntttttttttttttttttttttttttttttt

SEQ ID NO: 266 - DNA, 84 bp, Artificial
  Barcode component
  misc_feature (33)..(34): n is a, c, g, or t
  misc_feature (43)..(44): n is a, c, g, or t
  misc_feature (53)..(54): n is a, c, g, or t
tttttttaagcagtggtatcaacgcagagtacnngattggagnnccaacagtnntttttttttttttttttttttttttttttt

SEQ ID NO: 267 - DNA, 84 bp, Artificial
  Barcode component
  misc_feature (33)..(34): n is a, c, g, or t
  misc_feature (43)..(44): n is a, c, g, or t
  misc_feature (53)..(54): n is a, c, g, or t
tttttttaagcagtggtatcaacgcagagtacnngattggagnnagaacagcnntttttttttttttttttttttttttttttt

SEQ ID NO: 268 - DNA, 84 bp, Artificial
  Barcode component
  misc_feature (33)..(34): n is a, c, g, or t
  misc_feature (43)..(44): n is a, c, g, or t
  misc_feature (53)..(54): n is a, c, g, or t
tttttttaagcagtggtatcaacgcagagtacnngattggagnngaacacgtnntttttttttttttttttttttttttttttt

SEQ ID NO: 269 - DNA, 84 bp, Artificial
  Barcode component
  misc_feature (33)..(34): n is a, c, g, or t
  misc_feature (43)..(44): n is a, c, g, or t
  misc_feature (53)..(54): n is a, c, g, or t
tttttttaagcagtggtatcaacgcagagtacnngattggagnnggtcttcanntttttttttttttttttttttttttttttt

SEQ ID NO: 270 - DNA, 84 bp, Artificial
  Barcode component
  misc_feature (33)..(34): n is a, c, g, or t
  misc_feature (43)..(44): n is a, c, g, or t
  misc_feature (53)..(54): n is a, c, g, or t
tttttttaagcagtggtatcaacgcagagtacnngattggagnnaggttcagnntttttttttttttttttttttttttttttt

SEQ ID NO: 271 - DNA, 84 bp, Artificial
  Barcode component
  misc_feature (33)..(34): n is a, c, g, or t
  misc_feature (43)..(44): n is a, c, g, or t
  misc_feature (53)..(54): n is a, c, g, or t
tttttttaagcagtggtatcaacgcagagtacnngattggagnnctagagcanntttttttttttttttttttttttttttttt

SEQ ID NO: 272 - DNA, 84 bp, Artificial
  Barcode component
  misc_feature (33)..(34): n is a, c, g, or t
  misc_feature (43)..(44): n is a, c, g, or t
  misc_feature (53)..(54): n is a, c, g, or t
tttttttaagcagtggtatcaacgcagagtacnngattggagnncttctagcnntttttttttttttttttttttttttttttt

SEQ ID NO: 273 - DNA, 84 bp, Artificial
  Barcode component
  misc_feature (33)..(34): n is a, c, g, or t
  misc_feature (43)..(44): n is a, c, g, or t
  misc_feature (53)..(54): n is a, c, g, or t
tttttttaagcagtggtatcaacgcagagtacnngattggagnngagtaacgnntttttttttttttttttttttttttttttt

SEQ ID NO: 274 - DNA, 84 bp, Artificial
  Barcode component
  misc_feature (33)..(34): n is a, c, g, or t
  misc_feature (43)..(44): n is a, c, g, or t
  misc_feature (53)..(54): n is a, c, g, or t
tttttttaagcagtggtatcaacgcagagtacnngattggagnnctaagaggnntttttttttttttttttttttttttttttt

SEQ ID NO: 275 - DNA, 84 bp, Artificial
  Barcode component
  misc_feature (33)..(34): n is a, c, g, or t
  misc_feature (43)..(44): n is a, c, g, or t
  misc_feature (53)..(54): n is a, c, g, or t
tttttttaagcagtggtatcaacgcagagtacnngattggagnnacgtgtagnntttttttttttttttttttttttttttttt

SEQ ID NO: 276 - DNA, 84 bp, Artificial
  Barcode component
  misc_feature (33)..(34): n is a, c, g, or t
  misc_feature (43)..(44): n is a, c, g, or t
  misc_feature (53)..(54): n is a, c, g, or t
tttttttaagcagtggtatcaacgcagagtacnngattggagnnactacaggnntttttttttttttttttttttttttttttt

SEQ ID NO: 277 - DNA, 84 bp, Artificial
  Barcode component
  misc_feature (33)..(34): n is a, c, g, or t
  misc_feature (43)..(44): n is a, c, g, or t
  misc_feature (53)..(54): n is a, c, g, or t
tttttttaagcagtggtatcaacgcagagtacnngattggagnntacaggtcnntttttttttttttttttttttttttttttt

SEQ ID NO: 278 - DNA, 84 bp, Artificial
  Barcode component
  misc_feature (33)..(34): n is a, c, g, or t
  misc_feature (43)..(44): n is a, c, g, or t
  misc_feature (53)..(54): n is a, c, g, or t
tttttttaagcagtggtatcaacgcagagtacnngattggagnnctcacatgnntttttttttttttttttttttttttttttt

SEQ ID NO: 279 - DNA, 84 bp, Artificial
  Barcode component
  misc_feature (33)..(34): n is a, c, g, or t
  misc_feature (43)..(44): n is a, c, g, or t
  misc_feature (53)..(54): n is a, c, g, or t
tttttttaagcagtggtatcaacgcagagtacnngattggagnnactaggagnntttttttttttttttttttttttttttttt

SEQ ID NO: 280 - DNA, 84 bp, Artificial
  Barcode component
  misc_feature (33)..(34): n is a, c, g, or t
  misc_feature (43)..(44): n is a, c, g, or t
  misc_feature (53)..(54): n is a, c, g, or t
tttttttaagcagtggtatcaacgcagagtacnngattggagnnccatagganntttttttttttttttttttttttttttttt

SEQ ID NO: 281 - DNA, 84 bp, Artificial
  Barcode component
  misc_feature (33)..(34): n is a, c, g, or t
  misc_feature (43)..(44): n is a, c, g, or t
  misc_feature (53)..(54): n is a, c, g, or t
tttttttaagcagtggtatcaacgcagagtacnngattggagnnggagaatcnntttttttttttttttttttttttttttttt

SEQ ID NO: 282 - DNA, 84 bp, Artificial
  Barcode component
  misc_feature (33)..(34): n is a, c, g, or t
  misc_feature (43)..(44): n is a, c, g, or t
  misc_feature (53)..(54): n is a, c, g, or t
tttttttaagcagtggtatcaacgcagagtacnngattggagnngccaagaanntttttttttttttttttttttttttttttt

SEQ ID NO: 283 - DNA, 84 bp, Artificial
  Barcode component
  misc_feature (33)..(34): n is a, c, g, or t
  misc_feature (43)..(44): n is a, c, g, or t
  misc_feature (53)..(54): n is a, c, g, or t
tttttttaagcagtggtatcaacgcagagtacnngattggagnnaaggcaagnntttttttttttttttttttttttttttttt

SEQ ID NO: 284 - DNA, 84 bp, Artificial
  Barcode component
  misc_feature (33)..(34): n is a, c, g, or t
  misc_feature (43)..(44): n is a, c, g, or t
  misc_feature (53)..(54): n is a, c, g, or t
tttttttaagcagtggtatcaacgcagagtacnngattggagnnaatgtcgcnntttttttttttttttttttttttttttttt

SEQ ID NO: 285 - DNA, 84 bp, Artificial
  Barcode component
  misc_feature (33)..(34): n is a, c, g, or t
  misc_feature (43)..(44): n is a, c, g, or t
  misc_feature (53)..(54): n is a, c, g, or t
tttttttaagcagtggtatcaacgcagagtacnngattggagnnatggaaccnntttttttttttttttttttttttttttttt

SEQ ID NO: 286 - DNA, 84 bp, Artificial
  Barcode component
  misc_feature (33)..(34): n is a, c, g, or t
  misc_feature (43)..(44): n is a, c, g, or t
  misc_feature (53)..(54): n is a, c, g, or t
tttttttaagcagtggtatcaacgcagagtacnngattggagnnagaggcatnntttttttttttttttttttttttttttttt

SEQ ID NO: 287 - DNA, 84 bp, Artificial
  Barcode component
  misc_feature (33)..(34): n is a, c, g, or t
  misc_feature (43)..(44): n is a, c, g, or t
  misc_feature (53)..(54): n is a, c, g, or t
tttttttaagcagtggtatcaacgcagagtacnngattggagnntgcatagcnntttttttttttttttttttttttttttttt

SEQ ID NO: 288 - DNA, 84 bp, Artificial
  Barcode component
  misc_feature (33)..(34): n is a, c, g, or t
  misc_feature (43)..(44): n is a, c, g, or t
  misc_feature (53)..(54): n is a, c, g, or t
tttttttaagcagtggtatcaacgcagagtacnngattggagnnctaacgganntttttttttttttttttttttttttttttt

SEQ ID NO: 289 - DNA, 84 bp, Artificial
  Barcode component
  misc_feature (33)..(34): n is a, c, g, or t
  misc_feature (43)..(44): n is a, c, g, or t
  misc_feature (53)..(54): n is a, c, g, or t
tttttttaagcagtggtatcaacgcagagtacnngattggagnntatcgaggnntttttttttttttttttttttttttttttt

SEQ ID NO: 290 - DNA, 84 bp, Artificial
  Barcode component
  misc_feature (33)..(34): n is a, c, g, or t
  misc_feature (43)..(44): n is a, c, g, or t
  misc_feature (53)..(54): n is a, c, g, or t
tttttttaagcagtggtatcaacgcagagtacnngattggagnncatagcctnntttttttttttttttttttttttttttttt

SEQ ID NO: 291 - DNA, 84 bp, Artificial
  Barcode component
  misc_feature (33)..(34): n is a, c, g, or t
  misc_feature (43)..(44): n is a, c, g, or t
  misc_feature (53)..(54): n is a, c, g, or t
tttttttaagcagtggtatcaacgcagagtacnngattggagnnatcgagacnntttttttttttttttttttttttttttttt

SEQ ID NO: 292 - DNA, 84 bp, Artificial
  Barcode component
  misc_feature (33)..(34): n is a, c, g, or t
  misc_feature (43)..(44): n is a, c, g, or t
  misc_feature (53)..(54): n is a, c, g, or t
tttttttaagcagtggtatcaacgcagagtacnngattggagnnggaagagtnntttttttttttttttttttttttttttttt

SEQ ID NO: 293 - DNA, 84 bp, Artificial
  Barcode component
  misc_feature (33)..(34): n is a, c, g, or t
  misc_feature (43)..(44): n is a, c, g, or t
  misc_feature (53)..(54): n is a, c, g, or t
tttttttaagcagtggtatcaacgcagagtacnngattggagnnccaagtagnntttttttttttttttttttttttttttttt

SEQ ID NO: 294 - DNA, 84 bp, Artificial
  Barcode component
  misc_feature (33)..(34): n is a, c, g, or t
  misc_feature (43)..(44): n is a, c, g, or t
  misc_feature (53)..(54): n is a, c, g, or t
tttttttaagcagtggtatcaacgcagagtacnngattggagnnctgaacagnntttttttttttttttttttttttttttttt

SEQ ID NO: 295 - DNA, 84 bp, Artificial
  Barcode component
  misc_feature (33)..(34): n is a, c, g, or t
  misc_feature (43)..(44): n is a, c, g, or t
  misc_feature (53)..(54): n is a, c, g, or t
tttttttaagcagtggtatcaacgcagagtacnngattggagnngtaggttcnntttttttttttttttttttttttttttttt

SEQ ID NO: 296 - DNA, 84 bp, Artificial
  Barcode component
  misc_feature (33)..(34): n is a, c, g, or t
  misc_feature (43)..(44): n is a, c, g, or t
  misc_feature (53)..(54): n is a, c, g, or t
tttttttaagcagtggtatcaacgcagagtacnngattggagnngtatggacnntttttttttttttttttttttttttttttt

SEQ ID NO: 297 - DNA, 84 bp, Artificial
  Barcode component
  misc_feature (33)..(34): n is a, c, g, or t
  misc_feature (43)..(44): n is a, c, g, or t
  misc_feature (53)..(54): n is a, c, g, or t
tttttttaagcagtggtatcaacgcagagtacnngattggagnntcgcaacanntttttttttttttttttttttttttttttt

SEQ ID NO: 298 - DNA, 84 bp, Artificial
  Barcode component
  misc_feature (33)..(34): n is a, c, g, or t
  misc_feature (43)..(44): n is a, c, g, or t
  misc_feature (53)..(54): n is a, c, g, or t
tttttttaagcagtggtatcaacgcagagtacnngattggagnnccgctaatnntttttttttttttttttttttttttttttt

SEQ ID NO: 299 - DNA, 84 bp, Artificial
  Barcode component
  misc_feature (33)..(34): n is a, c, g, or t
  misc_feature (43)..(44): n is a, c, g, or t
  misc_feature (53)..(54): n is a, c, g, or t
tttttttaagcagtggtatcaacgcagagtacnngattggagnngattcgcanntttttttttttttttttttttttttttttt

SEQ ID NO: 300 - DNA, 84 bp, Artificial
  Barcode component
  misc_feature (33)..(34): n is a, c, g, or t
  misc_feature (43)..(44): n is a, c, g, or t
  misc_feature (53)..(54): n is a, c, g, or t
tttttttaagcagtggtatcaacgcagagtacnngattggagnncgatggaanntttttttttttttttttttttttttttttt

SEQ ID NO: 301 - DNA, 84 bp, Artificial
  Barcode component
  misc_feature (33)..(34): n is a, c, g, or t
  misc_feature (43)..(44): n is a, c, g, or t
  misc_feature (53)..(54): n is a, c, g, or t
tttttttaagcagtggtatcaacgcagagtacnngattggagnnagcaagganntttttttttttttttttttttttttttttt

SEQ ID NO: 302 - DNA, 84 bp, Artificial
  Barcode component
  misc_feature (33)..(34): n is a, c, g, or t
  misc_feature (43)..(44): n is a, c, g, or t
  misc_feature (53)..(54): n is a, c, g, or t
tttttttaagcagtggtatcaacgcagagtacnngattggagnncgtagcaanntttttttttttttttttttttttttttttt

SEQ ID NO: 303 - DNA, 84 bp, Artificial
  Barcode component
  misc_feature (33)..(34): n is a, c, g, or t
  misc_feature (43)..(44): n is a, c, g, or t
  misc_feature (53)..(54): n is a, c, g, or t
tttttttaagcagtggtatcaacgcagagtacnngattggagnntggcagtanntttttttttttttttttttttttttttttt

SEQ ID NO: 304 - DNA, 84 bp, Artificial
  Barcode component
  misc_feature (33)..(34): n is a, c, g, or t
  misc_feature (43)..(44): n is a, c, g, or t
  misc_feature (53)..(54): n is a, c, g, or t
tttttttaagcagtggtatcaacgcagagtacnngattggagnncggtagttnntttttttttttttttttttttttttttttt

SEQ ID NO: 305 - DNA, 84 bp, Artificial
  Barcode component
  misc_feature (33)..(34): n is a, c, g, or t
  misc_feature (43)..(44): n is a, c, g, or t
  misc_feature (53)..(54): n is a, c, g, or t
tttttttaagcagtggtatcaacgcagagtacnngattggagnntgacttcgnntttttttttttttttttttttttttttttt

SEQ ID NO: 306 - DNA, 84 bp, Artificial
  Barcode component
  misc_feature (33)..(34): n is a, c, g, or t
  misc_feature (43)..(44): n is a, c, g, or t
  misc_feature (53)..(54): n is a, c, g, or t
tttttttaagcagtggtatcaacgcagagtacnngattggagnngagtgcaanntttttttttttttttttttttttttttttt

SEQ ID NO: 307 - DNA, 84 bp, Artificial
  Barcode component
  misc_feature (33)..(34): n is a, c, g, or t
  misc_feature (43)..(44): n is a, c, g, or t
  misc_feature (53)..(54): n is a, c, g, or t
tttttttaagcagtggtatcaacgcagagtacnngattggagnnacggtaacnntttttttttttttttttttttttttttttt

SEQ ID NO: 308 - DNA, 84 bp, Artificial
  Barcode component
  misc_feature (33)..(34): n is a, c, g, or t
  misc_feature (43)..(44): n is a, c, g, or t
  misc_feature (53)..(54): n is a, c, g, or t
tttttttaagcagtggtatcaacgcagagtacnngattggagnnaagtggtgnntttttttttttttttttttttttttttttt

SEQ ID NO: 309 - DNA, 84 bp, Artificial
  Barcode component
  misc_feature (33)..(34): n is a, c, g, or t
  misc_feature (43)..(44): n is a, c, g, or t
  misc_feature (53)..(54): n is a, c, g, or t
tttttttaagcagtggtatcaacgcagagtacnngattggagnnggagacaanntttttttttttttttttttttttttttttt

SEQ ID NO: 310 - DNA, 84 bp, Artificial
  Barcode component
  misc_feature (33)..(34): n is a, c, g, or t
  misc_feature (43)..(44): n is a, c, g, or t
  misc_feature (53)..(54): n is a, c, g, or t
tttttttaagcagtggtatcaacgcagagtacnngattggagnntcaaggacnntttttttttttttttttttttttttttttt

SEQ ID NO: 311 - DNA, 84 bp, Artificial
  Barcode component
  misc_feature (33)..(34): n is a, c, g, or t
  misc_feature (43)..(44): n is a, c, g, or t
  misc_feature (53)..(54): n is a, c, g, or t
tttttttaagcagtggtatcaacgcagagtacnngattggagnnaagagagcnntttttttttttttttttttttttttttttt

SEQ ID NO: 312 - DNA, 84 bp, Artificial
  Barcode component
  misc_feature (33)..(34): n is a, c, g, or t
  misc_feature (43)..(44): n is a, c, g, or t
  misc_feature (53)..(54): n is a, c, g, or t
tttttttaagcagtggtatcaacgcagagtacnngattggagnncgagagatnntttttttttttttttttttttttttttttt

SEQ ID NO: 313 - DNA, 84 bp, Artificial
  Barcode component
  misc_feature (33)..(34): n is a, c, g, or t
  misc_feature (43)..(44): n is a, c, g, or t
  misc_feature (53)..(54): n is a, c, g, or t
tttttttaagcagtggtatcaacgcagagtacnngattggagnnacagatggnntttttttttttttttttttttttttttttt

SEQ ID NO: 314 - DNA, 84 bp, Artificial
  Barcode component
  misc_feature (33)..(34): n is a, c, g, or t
  misc_feature (43)..(44): n is a, c, g, or t
  misc_feature (53)..(54): n is a, c, g, or t
tttttttaagcagtggtatcaacgcagagtacnngattggagnnaggagtcanntttttttttttttttttttttttttttttt

SEQ ID NO: 315 - DNA, 84 bp, Artificial
  Barcode component
  misc_feature (33)..(34): n is a, c, g, or t
  misc_feature (43)..(44): n is a, c, g, or t
  misc_feature (53)..(54): n is a, c, g, or t
tttttttaagcagtggtatcaacgcagagtacnngattggagnncgtgttacnntttttttttttttttttttttttttttttt

SEQ ID NO: 316 - DNA, 84 bp, Artificial
  Barcode component
  misc_feature (33)..(34): n is a, c, g, or t
  misc_feature (43)..(44): n is a, c, g, or t
  misc_feature (53)..(54): n is a, c, g, or t
tttttttaagcagtggtatcaacgcagagtacnngattggagnntagtgtgcnntttttttttttttttttttttttttttttt

SEQ ID NO: 317 - DNA, 84 bp, Artificial
  Barcode component
  misc_feature (33)..(34): n is a, c, g, or t
  misc_feature (43)..(44): n is a, c, g, or t
  misc_feature (53)..(54): n is a, c, g, or t
tttttttaagcagtggtatcaacgcagagtacnngattggagnnctcatgacnntttttttttttttttttttttttttttttt

SEQ ID NO: 318 - DNA, 84 bp, Artificial
  Barcode component
  misc_feature (33)..(34): n is a, c, g, or t
  misc_feature (43)..(44): n is a, c, g, or t
  misc_feature (53)..(54): n is a, c, g, or t
tttttttaagcagtggtatcaacgcagagtacnngattggagnngtatccagnntttttttttttttttttttttttttttttt

SEQ ID NO: 319 - DNA, 84 bp, Artificial
  Barcode component
  misc_feature (33)..(34): n is a, c, g, or t
  misc_feature (43)..(44): n is a, c, g, or t
  misc_feature (53)..(54): n is a, c, g, or t
tttttttaagcagtggtatcaacgcagagtacnngattggagnnacgcctatnntttttttttttttttttttttttttttttt

SEQ ID NO: 320 - DNA, 84 bp, Artificial
  Barcode component
  misc_feature (33)..(34): n is a, c, g, or t
  misc_feature (43)..(44): n is a, c, g, or t
  misc_feature (53)..(54): n is a, c, g, or t
tttttttaagcagtggtatcaacgcagagtacnngattggagnnaacgacctnntttttttttttttttttttttttttttttt

SEQ ID NO: 321 - DNA, 84 bp, Artificial
  Barcode component
  misc_feature (33)..(34): n is a, c, g, or t
  misc_feature (43)..(44): n is a, c, g, or t
  misc_feature (53)..(54): n is a, c, g, or t
tttttttaagcagtggtatcaacgcagagtacnngattggagnnatcaggctnntttttttttttttttttttttttttttttt

SEQ ID NO: 322 - DNA, 84 bp, Artificial
  Barcode component
  misc_feature (33)..(34): n is a, c, g, or t
  misc_feature (43)..(44): n is a, c, g, or t
  misc_feature (53)..(54): n is a, c, g, or t
tttttttaagcagtggtatcaacgcagagtacnngattggagnncaagttcgnntttttttttttttttttttttttttttttt

SEQ ID NO: 323 - DNA, 84 bp, Artificial
  Barcode component
  misc_feature (33)..(34): n is a, c, g, or t
  misc_feature (43)..(44): n is a, c, g, or t
  misc_feature (53)..(54): n is a, c, g, or t
tttttttaagcagtggtatcaacgcagagtacnngattggagnntagccaganntttttttttttttttttttttttttttttt

SEQ ID NO: 324 - DNA, 84 bp, Artificial
  Barcode component
  misc_feature (33)..(34): n is a, c, g, or t
  misc_feature (43)..(44): n is a, c, g, or t
  misc_feature (53)..(54): n is a, c, g, or t
tttttttaagcagtggtatcaacgcagagtacnngattggagnncaatcacgnntttttttttttttttttttttttttttttt

SEQ ID NO: 325 - DNA, 84 bp, Artificial
  Barcode component
  misc_feature (33)..(34): n is a, c, g, or t
  misc_feature (43)..(44): n is a, c, g, or t
  misc_feature (53)..(54): n is a, c, g, or t
tttttttaagcagtggtatcaacgcagagtacnngattggagnngcaacaagnntttttttttttttttttttttttttttttt

SEQ ID NO: 326 - DNA, 84 bp, Artificial
  Barcode component
  misc_feature (33)..(34): n is a, c, g, or t
  misc_feature (43)..(44): n is a, c, g, or t
  misc_feature (53)..(54): n is a, c, g, or t
tttttttaagcagtggtatcaacgcagagtacnngattggagnncacgacaanntttttttttttttttttttttttttttttt

SEQ ID NO: 327 - DNA, 84 bp, Artificial
  Barcode component
  misc_feature (33)..(34): n is a, c, g, or t
  misc_feature (43)..(44): n is a, c, g, or t
  misc_feature (53)..(54): n is a, c, g, or t
tttttttaagcagtggtatcaacgcagagtacnngattggagnntacggaganntttttttttttttttttttttttttttttt

SEQ ID NO: 328 - DNA, 84 bp, Artificial
  Barcode component
  misc_feature (33)..(34): n is a, c, g, or t
  misc_feature (43)..(44): n is a, c, g, or t
  misc_feature (53)..(54): n is a, c, g, or t
tttttttaagcagtggtatcaacgcagagtacnngattggagnncgacaaganntttttttttttttttttttttttttttttt

SEQ ID NO: 329 - DNA, 84 bp, Artificial
  Barcode component
  misc_feature (33)..(34): n is a, c, g, or t
  misc_feature (43)..(44): n is a, c, g, or t
  misc_feature (53)..(54): n is a, c, g, or t
tttttttaagcagtggtatcaacgcagagtacnngattggagnncgaagtganntttttttttttttttttttttttttttttt

SEQ ID NO: 330 - DNA, 84 bp, Artificial
  Barcode component
  misc_feature (33)..(34): n is a, c, g, or t
  misc_feature (43)..(44): n is a, c, g, or t
  misc_feature (53)..(54): n is a, c, g, or t
tttttttaagcagtggtatcaacgcagagtacnngattggagnnagctggtanntttttttttttttttttttttttttttttt

SEQ ID NO: 331 - DNA, 84 bp, Artificial
  Barcode component
  misc_feature (33)..(34): n is a, c, g, or t
  misc_feature (43)..(44): n is a, c, g, or t
  misc_feature (53)..(54): n is a, c, g, or t
tttttttaagcagtggtatcaacgcagagtacnngattggagnnaactaggcnntttttttttttttttttttttttttttttt

SEQ ID NO: 332 - DNA, 84 bp, Artificial
  Barcode component
  misc_feature (33)..(34): n is a, c, g, or t
  misc_feature (43)..(44): n is a, c, g, or t
  misc_feature (53)..(54): n is a, c, g, or t
tttttttaagcagtggtatcaacgcagagtacnngattggagnncagcaagtnntttttttttttttttttttttttttttttt

SEQ ID NO: 333 - DNA, 84 bp, Artificial
  Barcode component
  misc_feature (33)..(34): n is a, c, g, or t
  misc_feature (43)..(44): n is a, c, g, or t
  misc_feature (53)..(54): n is a, c, g, or t
tttttttaagcagtggtatcaacgcagagtacnngattggagnnacgaggtanntttttttttttttttttttttttttttttt

SEQ ID NO: 334 - DNA, 84 bp, Artificial
  Barcode component
  misc_feature (33)..(34): n is a, c, g, or t
  misc_feature (43)..(44): n is a, c, g, or t
  misc_feature (53)..(54): n is a, c, g, or t
tttttttaagcagtggtatcaacgcagagtacnngattggagnncatcttccnntttttttttttttttttttttttttttttt

SEQ ID NO: 335 - DNA, 84 bp, Artificial
  Barcode component
  misc_feature (33)..(34): n is a, c, g, or t
  misc_feature (43)..(44): n is a, c, g, or t
  misc_feature (53)..(54): n is a, c, g, or t
tttttttaagcagtggtatcaacgcagagtacnngattggagnncctgaatcnntttttttttttttttttttttttttttttt

SEQ ID NO: 336 - DNA, 84 bp, Artificial
  Barcode component
  misc_feature (33)..(34): n is a, c, g, or t
  misc_feature (43)..(44): n is a, c, g, or t
  misc_feature (53)..(54): n is a, c, g, or t
tttttttaagcagtggtatcaacgcagagtacnngattggagnntgcagactnntttttttttttttttttttttttttttttt

SEQ ID NO: 337 - DNA, 84 bp, Artificial
  Barcode component
  misc_feature (33)..(34): n is a, c, g, or t
  misc_feature (43)..(44): n is a, c, g, or t
  misc_feature (53)..(54): n is a, c, g, or t
tttttttaagcagtggtatcaacgcagagtacnngattggagnnagatgtggnntttttttttttttttttttttttttttttt

SEQ ID NO: 338 - DNA, 84 bp, Artificial
  Barcode component
  misc_feature (33)..(34): n is a, c, g, or t
  misc_feature (43)..(44): n is a, c, g, or t
  misc_feature (53)..(54): n is a, c, g, or t
tttttttaagcagtggtatcaacgcagagtacnngattggagnnagttcgacnntttttttttttttttttttttttttttttt

SEQ ID NO: 339 - DNA, 84 bp, Artificial
  Barcode component
  misc_feature (33)..(34): n is a, c, g, or t
  misc_feature (43)..(44): n is a, c, g, or t
  misc_feature (53)..(54): n is a, c, g, or t
tttttttaagcagtggtatcaacgcagagtacnngattggagnnacaacctcnntttttttttttttttttttttttttttttt

SEQ ID NO: 340 - DNA, 84 bp, Artificial
  Barcode component
  misc_feature (33)..(34): n is a, c, g, or t
  misc_feature (43)..(44): n is a, c, g, or t
  misc_feature (53)..(54): n is a, c, g, or t
tttttttaagcagtggtatcaacgcagagtacnngattggagnncatggtagnntttttttttttttttttttttttttttttt

SEQ ID NO: 341 - DNA, 84 bp, Artificial
  Barcode component
  misc_feature (33)..(34): n is a, c, g, or t
  misc_feature (43)..(44): n is a, c, g, or t
  misc_feature (53)..(54): n is a, c, g, or t
tttttttaagcagtggtatcaacgcagagtacnngattggagnncgtatctcnntttttttttttttttttttttttttttttt

SEQ ID NO: 342 - DNA, 84 bp, Artificial
  Barcode component
  misc_feature (33)..(34): n is a, c, g, or t
  misc_feature (43)..(44): n is a, c, g, or t
  misc_feature (53)..(54): n is a, c, g, or t
tttttttaagcagtggtatcaacgcagagtacnngattggagnncctagttcnntttttttttttttttttttttttttttttt

SEQ ID NO: 343 - DNA, 84 bp, Artificial
  Barcode component
  misc_feature (33)..(34): n is a, c, g, or t
  misc_feature (43)..(44): n is a, c, g, or t
  misc_feature (53)..(54): n is a, c, g, or t
tttttttaagcagtggtatcaacgcagagtacnngattggagnncaagagtcnntttttttttttttttttttttttttttttt

SEQ ID NO: 344 - DNA, 84 bp, Artificial
  Barcode component
  misc_feature (33)..(34): n is a, c, g, or t
  misc_feature (43)..(44): n is a, c, g, or t
  misc_feature (53)..(54): n is a, c, g, or t
tttttttaagcagtggtatcaacgcagagtacnnggatgaagnnaatcggcanntttttttttttttttttttttttttttttt

SEQ ID NO: 345 - DNA, 84 bp, Artificial
  Barcode component
  misc_feature (33)..(34): n is a, c, g, or t
  misc_feature (43)..(44): n is a, c, g, or t
  misc_feature (53)..(54): n is a, c, g, or t
tttttttaagcagtggtatcaacgcagagtacnnggatgaagnntacggcatnntttttttttttttttttttttttttttttt

SEQ ID NO: 346 - DNA, 84 bp, Artificial
  Barcode component
  misc_feature (33)..(34): n is a, c, g, or t
  misc_feature (43)..(44): n is a, c, g, or t
  misc_feature (53)..(54): n is a, c, g, or t
tttttttaagcagtggtatcaacgcagagtacnnggatgaagnnttggatcgnntttttttttttttttttttttttttttttt

SEQ ID NO: 347 - DNA, 84 bp, Artificial
  Barcode component
  misc_feature (33)..(34): n is a, c, g, or t
  misc_feature (43)..(44): n is a, c, g, or t
  misc_feature (53)..(54): n is a, c, g, or t
tttttttaagcagtggtatcaacgcagagtacnnggatgaagnntggaacganntttttttttttttttttttttttttttttt

SEQ ID NO: 348 - DNA, 84 bp, Artificial
  Barcode component
  misc_feature (33)..(34): n is a, c, g, or t
  misc_feature (43)..(44): n is a, c, g, or t
  misc_feature (53)..(54): n is a, c, g, or t
tttttttaagcagtggtatcaacgcagagtacnnggatgaagnnggcaatcanntttttttttttttttttttttttttttttt

SEQ ID NO: 349 - DNA, 84 bp, Artificial
  Barcode component
  misc_feature (33)..(34): n is a, c, g, or t
  misc_feature (43)..(44): n is a, c, g, or t
  misc_feature (53)..(54): n is a, c, g, or t
tttttttaagcagtggtatcaacgcagagtacnnggatgaagnngaatccganntttttttttttttttttttttttttttttt

SEQ ID NO: 350 - DNA, 84 bp, Artificial
  Barcode component
  misc_feature (33)..(34): n is a, c, g, or t
  misc_feature (43)..(44): n is a, c, g, or t
  misc_feature (53)..(54): n is a, c, g, or t
tttttttaagcagtggtatcaacgcagagtacnnggatgaagnnttacggtgnntttttttttttttttttttttttttttttt

SEQ ID NO: 351 - DNA, 84 bp, Artificial
  Barcode component
  misc_feature (33)..(34): n is a, c, g, or t
  misc_feature (43)..(44): n is a, c, g, or t
  misc_feature (53)..(54): n is a, c, g, or t
tttttttaagcagtggtatcaacgcagagtacnnggatgaagnncatatcggnntttttttttttttttttttttttttttttt

SEQ ID NO: 352 - DNA, 84 bp, Artificial
  Barcode component
  misc_feature (33)..(34): n is a, c, g, or t
  misc_feature (43)..(44): n is a, c, g, or t
  misc_feature (53)..(54): n is a, c, g, or t
tttttttaagcagtggtatcaacgcagagtacnnggatgaagnncttcggtanntttttttttttttttttttttttttttttt

SEQ ID NO: 353 - DNA, 84 bp, Artificial
  Barcode component
  misc_feature (33)..(34): n is a, c, g, or t
  misc_feature (43)..(44): n is a, c, g, or t
  misc_feature (53)..(54): n is a, c, g, or t
tttttttaagcagtggtatcaacgcagagtacnnggatgaagnntcctaacgnntttttttttttttttttttttttttttttt

SEQ ID NO: 354 - DNA, 84 bp, Artificial
  Barcode component
  misc_feature (33)..(34): n is a, c, g, or t
  misc_feature (43)..(44): n is a, c, g, or t
  misc_feature (53)..(54): n is a, c, g, or t
tttttttaagcagtggtatcaacgcagagtacnnggatgaagnngtaagccanntttttttttttttttttttttttttttttt

SEQ ID NO: 355 - DNA, 84 bp, Artificial
  Barcode component
  misc_feature (33)..(34): n is a, c, g, or t
  misc_feature (43)..(44): n is a, c, g, or t
  misc_feature (53)..(54): n is a, c, g, or t
tttttttaagcagtggtatcaacgcagagtacnnggatgaagnntaaggtggnntttttttttttttttttttttttttttttt

SEQ ID NO: 356 - DNA, 84 bp, Artificial
  Barcode component
  misc_feature (33)..(34): n is a, c, g, or t
  misc_feature (43)..(44): n is a, c, g, or t
  misc_feature (53)..(54): n is a, c, g, or t
tttttttaagcagtggtatcaacgcagagtacnnggatgaagnnggtaagctnntttttttttttttttttttttttttttttt

SEQ ID NO: 357 - DNA, 84 bp, Artificial
  Barcode component
  misc_feature (33)..(34): n is a, c, g, or t
  misc_feature (43)..(44): n is a, c, g, or t
  misc_feature (53)..(54): n is a, c, g, or t
tttttttaagcagtggtatcaacgcagagtacnnggatgaagnntgtgtcganntttttttttttttttttttttttttttttt

SEQ ID NO: 358 - DNA, 84 bp, Artificial
  Barcode component
  misc_feature (33)..(34): n is a, c, g, or t
  misc_feature (43)..(44): n is a, c, g, or t
  misc_feature (53)..(54): n is a, c, g, or t
tttttttaagcagtggtatcaacgcagagtacnnggatgaagnngagcatganntttttttttttttttttttttttttttttt

SEQ ID NO: 359 - DNA, 84 bp, Artificial
  Barcode component
  misc_feature (33)..(34): n is a, c, g, or t
  misc_feature (43)..(44): n is a, c, g, or t
  misc_feature (53)..(54): n is a, c, g, or t
tttttttaagcagtggtatcaacgcagagtacnnggatgaagnntcgaagtcnntttttttttttttttttttttttttttttt

SEQ ID NO: 360 - DNA, 84 bp, Artificial
  Barcode component
  misc_feature (33)..(34): n is a, c, g, or t
  misc_feature (43)..(44): n is a, c, g, or t
  misc_feature (53)..(54): n is a, c, g, or t
tttttttaagcagtggtatcaacgcagagtacnnggatgaagnnggtgaacanntttttttttttttttttttttttttttttt

SEQ ID NO: 361 - DNA, 84 bp, Artificial
  Barcode component
  misc_feature (33)..(34): n is a, c, g, or t
  misc_feature (43)..(44): n is a, c, g, or t
  misc_feature (53)..(54): n is a, c, g, or t
tttttttaagcagtggtatcaacgcagagtacnnggatgaagnnacatgcacnntttttttttttttttttttttttttttttt

SEQ ID NO: 362 - DNA, 84 bp, Artificial
  Barcode component
  misc_feature (33)..(34): n is a, c, g, or t
  misc_feature (43)..(44): n is a, c, g, or t
  misc_feature (53)..(54): n is a, c, g, or t
tttttttaagcagtggtatcaacgcagagtacnnggatgaagnnccaacagtnntttttttttttttttttttttttttttttt

SEQ ID NO: 363 - DNA, 84 bp, Artificial
  Barcode component
  misc_feature (33)..(34): n is a, c, g, or t
  misc_feature (43)..(44): n is a, c, g, or t
  misc_feature (53)..(54): n is a, c, g, or t
tttttttaagcagtggtatcaacgcagagtacnnggatgaagnnagaacagcnntttttttttttttttttttttttttttttt

SEQ ID NO: 364 - DNA, 84 bp, Artificial
  Barcode component
  misc_feature (33)..(34): n is a, c, g, or t
  misc_feature (43)..(44): n is a, c, g, or t
  misc_feature (53)..(54): n is a, c, g, or t
tttttttaagcagtggtatcaacgcagagtacnnggatgaagnngaacacgtnntttttttttttttttttttttttttttttt

SEQ ID NO: 365 - DNA, 84 bp, Artificial
  Barcode component
  misc_feature (33)..(34): n is a, c, g, or t
  misc_feature (43)..(44): n is a, c, g, or t
  misc_feature (53)..(54): n is a, c, g, or t
tttttttaagcagtggtatcaacgcagagtacnnggatgaagnnggtcttcanntttttttttttttttttttttttttttttt

SEQ ID NO: 366 - DNA, 84 bp, Artificial
  Barcode component
  misc_feature (33)..(34): n is a, c, g, or t
  misc_feature (43)..(44): n is a, c, g, or t
  misc_feature (53)..(54): n is a, c, g, or t
tttttttaagcagtggtatcaacgcagagtacnnggatgaagnnaggttcagnntttttttttttttttttttttttttttttt

SEQ ID NO: 367 - DNA, 84 bp, Artificial
  Barcode component
  misc_feature (33)..(34): n is a, c, g, or t
  misc_feature (43)..(44): n is a, c, g, or t
  misc_feature (53)..(54): n is a, c, g, or t
tttttttaagcagtggtatcaacgcagagtacnnggatgaagnnctagagcanntttttttttttttttttttttttttttttt

SEQ ID NO: 368 - DNA, 84 bp, Artificial
  Barcode component
  misc_feature (33)..(34): n is a, c, g, or t
  misc_feature (43)..(44): n is a, c, g, or t
  misc_feature (53)..(54): n is a, c, g, or t
tttttttaagcagtggtatcaacgcagagtacnnggatgaagnncttctagcnntttttttttttttttttttttttttttttt

SEQ ID NO: 369 - DNA, 84 bp, Artificial
  Barcode component
  misc_feature (33)..(34): n is a, c, g, or t
  misc_feature (43)..(44): n is a, c, g, or t
  misc_feature (53)..(54): n is a, c, g, or t
tttttttaagcagtggtatcaacgcagagtacnnggatgaagnngagtaacgnntttttttttttttttttttttttttttttt

SEQ ID NO: 370 - DNA, 84 bp, Artificial
  Barcode component
  misc_feature (33)..(34): n is a, c, g, or t
  misc_feature (43)..(44): n is a, c, g, or t
  misc_feature (53)..(54): n is a, c, g, or t
tttttttaagcagtggtatcaacgcagagtacnnggatgaagnnctaagaggnntttttttttttttttttttttttttttttt

SEQ ID NO: 371 - DNA, 84 bp, Artificial
  Barcode component
  misc_feature (33)..(34): n is a, c, g, or t
  misc_feature (43)..(44): n is a, c, g, or t
  misc_feature (53)..(54): n is a, c, g, or t
tttttttaagcagtggtatcaacgcagagtacnnggatgaagnnacgtgtagnntttttttttttttttttttttttttttttt

SEQ ID NO: 372 - DNA, 84 bp, Artificial
  Barcode component
  misc_feature (33)..(34): n is a, c, g, or t
  misc_feature (43)..(44): n is a, c, g, or t
  misc_feature (53)..(54): n is a, c, g, or t
tttttttaagcagtggtatcaacgcagagtacnnggatgaagnnactacaggnntttttttttttttttttttttttttttttt

SEQ ID NO: 373 - DNA, 84 bp, Artificial
  Barcode component
  misc_feature (33)..(34): n is a, c, g, or t
  misc_feature (43)..(44): n is a, c, g, or t
  misc_feature (53)..(54): n is a, c, g, or t
tttttttaagcagtggtatcaacgcagagtacnnggatgaagnntacaggtcnntttttttttttttttttttttttttttttt

SEQ ID NO: 374 - DNA, 84 bp, Artificial
  Barcode component
  misc_feature (33)..(34): n is a, c, g, or t
  misc_feature (43)..(44): n is a, c, g, or t
  misc_feature (53)..(54): n is a, c, g, or t
tttttttaagcagtggtatcaacgcagagtacnnggatgaagnnctcacatgnntttttttttttttttttttttttttttttt

SEQ ID NO: 375 - DNA, 84 bp, Artificial
  Barcode component
  misc_feature (33)..(34): n is a, c, g, or t
  misc_feature (43)..(44): n is a, c, g, or t
  misc_feature (53)..(54): n is a, c, g, or t
tttttttaagcagtggtatcaacgcagagtacnnggatgaagnnactaggagnntttttttttttttttttttttttttttttt

SEQ ID NO: 376 - DNA, 84 bp, Artificial
  Barcode component
  misc_feature (33)..(34): n is a, c, g, or t
  misc_feature (43)..(44): n is a, c, g, or t
  misc_feature (53)..(54): n is a, c, g, or t
tttttttaagcagtggtatcaacgcagagtacnnggatgaagnnccatagganntttttttttttttttttttttttttttttt

SEQ ID NO: 377 - DNA, 84 bp, Artificial
  Barcode component
  misc_feature (33)..(34): n is a, c, g, or t
  misc_feature (43)..(44): n is a, c, g, or t
  misc_feature (53)..(54): n is a, c, g, or t
tttttttaagcagtggtatcaacgcagagtacnnggatgaagnnggagaatcnntttttttttttttttttttttttttttttt

SEQ ID NO: 378 - DNA, 84 bp, Artificial
  Barcode component
  misc_feature (33)..(34): n is a, c, g, or t
  misc_feature (43)..(44): n is a, c, g, or t
  misc_feature (53)..(54): n is a, c, g, or t
tttttttaagcagtggtatcaacgcagagtacnnggatgaagnngccaagaanntttttttttttttttttttttttttttttt

SEQ ID NO: 379 - DNA, 84 bp, Artificial
  Barcode component
  misc_feature (33)..(34): n is a, c, g, or t
  misc_feature (43)..(44): n is a, c, g, or t
  misc_feature (53)..(54): n is a, c, g, or t
tttttttaagcagtggtatcaacgcagagtacnnggatgaagnnaaggcaagnntttttttttttttttttttttttttttttt

SEQ ID NO: 380 - DNA, 84 bp, Artificial
  Barcode component
  misc_feature (33)..(34): n is a, c, g, or t
  misc_feature (43)..(44): n is a, c, g, or t
  misc_feature (53)..(54): n is a, c, g, or t
tttttttaagcagtggtatcaacgcagagtacnnggatgaagnnaatgtcgcnntttttttttttttttttttttttttttttt

SEQ ID NO: 381 - DNA, 84 bp, Artificial
  Barcode component
  misc_feature (33)..(34): n is a, c, g, or t
  misc_feature (43)..(44): n is a, c, g, or t
  misc_feature (53)..(54): n is a, c, g, or t
tttttttaagcagtggtatcaacgcagagtacnnggatgaagnnatggaaccnntttttttttttttttttttttttttttttt

SEQ ID NO: 382 - DNA, 84 bp, Artificial
  Barcode component
  misc_feature (33)..(34): n is a, c, g, or t
  misc_feature (43)..(44): n is a, c, g, or t
  misc_feature (53)..(54): n is a, c, g, or t
tttttttaagcagtggtatcaacgcagagtacnnggatgaagnnagaggcatnntttttttttttttttttttttttttttttt

SEQ ID NO: 383 - DNA, 84 bp, Artificial
  Barcode component
  misc_feature (33)..(34): n is a, c, g, or t
  misc_feature (43)..(44): n is a, c, g, or t
  misc_feature (53)..(54): n is a, c, g, or t
tttttttaagcagtggtatcaacgcagagtacnnggatgaagnntgcatagcnntttttttttttttttttttttttttttttt

SEQ ID NO: 384 - DNA, 84 bp, Artificial
  Barcode component
  misc_feature (33)..(34): n is a, c, g, or t
  misc_feature (43)..(44): n is a, c, g, or t
  misc_feature (53)..(54): n is a, c, g, or t
tttttttaagcagtggtatcaacgcagagtacnnggatgaagnnctaacgganntttttttttttttttttttttttttttttt

SEQ ID NO: 385 - DNA, 84 bp, Artificial
  Barcode component
  misc_feature (33)..(34): n is a, c, g, or t
  misc_feature (43)..(44): n is a, c, g, or t
  misc_feature (53)..(54): n is a, c, g, or t
tttttttaagcagtggtatcaacgcagagtacnnggatgaagnntatcgaggnntttttttttttttttttttttttttttttt

SEQ ID NO: 386 - DNA, 84 bp, Artificial
  Barcode component
  misc_feature (33)..(34): n is a, c, g, or t
  misc_feature (43)..(44): n is a, c, g, or t
  misc_feature (53)..(54): n is a, c, g, or t
tttttttaagcagtggtatcaacgcagagtacnnggatgaagnncatagcctnntttttttttttttttttttttttttttttt

SEQ ID NO: 387 - DNA, 84 bp, Artificial
  Barcode component
  misc_feature (33)..(34): n is a, c, g, or t
  misc_feature (43)..(44): n is a, c, g, or t
  misc_feature (53)..(54): n is a, c, g, or t
tttttttaagcagtggtatcaacgcagagtacnnggatgaagnnatcgagacnntttttttttttttttttttttttttttttt

SEQ ID NO: 388 - DNA, 84 bp, Artificial
  Barcode component
  misc_feature (33)..(34): n is a, c, g, or t
  misc_feature (43)..(44): n is a, c, g, or t
  misc_feature (53)..(54): n is a, c, g, or t
tttttttaagcagtggtatcaacgcagagtacnnggatgaagnnggaagagtnntttttttttttttttttttttttttttttt

SEQ ID NO: 389 - DNA, 84 bp, Artificial
  Barcode component
  misc_feature (33)..(34): n is a, c, g, or t
  misc_feature (43)..(44): n is a, c, g, or t
  misc_feature (53)..(54): n is a, c, g, or t
tttttttaagcagtggtatcaacgcagagtacnnggatgaagnnccaagtagnntttttttttttttttttttttttttttttt

SEQ ID NO: 390 - DNA, 84 bp, Artificial
  Barcode component
  misc_feature (33)..(34): n is a, c, g, or t
  misc_feature (43)..(44): n is a, c, g, or t
  misc_feature (53)..(54): n is a, c, g, or t
tttttttaagcagtggtatcaacgcagagtacnnggatgaagnnctgaacagnntttttttttttttttttttttttttttttt

SEQ ID NO: 391 - DNA, 84 bp, Artificial
  Barcode component
  misc_feature (33)..(34): n is a, c, g, or t
  misc_feature (43)..(44): n is a, c, g, or t
  misc_feature (53)..(54): n is a, c, g, or t
tttttttaagcagtggtatcaacgcagagtacnnggatgaagnngtaggttcnntttttttttttttttttttttttttttttt

SEQ ID NO: 392 - DNA, 84 bp, Artificial
  Barcode component
  misc_feature (33)..(34): n is a, c, g, or t
  misc_feature (43)..(44): n is a, c, g, or t
  misc_feature (53)..(54): n is a, c, g, or t
tttttttaagcagtggtatcaacgcagagtacnnggatgaagnngtatggacnntttttttttttttttttttttttttttttt

SEQ ID NO: 393 - DNA, 84 bp, Artificial
  Barcode component
  misc_feature (33)..(34): n is a, c, g, or t
  misc_feature (43)..(44): n is a, c, g, or t
  misc_feature (53)..(54): n is a, c, g, or t
tttttttaagcagtggtatcaacgcagagtacnnggatgaagnntcgcaacanntttttttttttttttttttttttttttttt

SEQ ID NO: 394 - DNA, 84 bp, Artificial
  Barcode component
  misc_feature (33)..(34): n is a, c, g, or t
  misc_feature (43)..(44): n is a, c, g, or t
  misc_feature (53)..(54): n is a, c, g, or t
tttttttaagcagtggtatcaacgcagagtacnnggatgaagnnccgctaatnntttttttttttttttttttttttttttttt

SEQ ID NO: 395 - DNA, 84 bp, Artificial
  Barcode component
  misc_feature (33)..(34): n is a, c, g, or t
  misc_feature (43)..(44): n is a, c, g, or t
  misc_feature (53)..(54): n is a, c, g, or t
tttttttaagcagtggtatcaacgcagagtacnnggatgaagnngattcgcanntttttttttttttttttttttttttttttt

SEQ ID NO: 396 - DNA, 84 bp, Artificial
  Barcode component
  misc_feature (33)..(34): n is a, c, g, or t
  misc_feature (43)..(44): n is a, c, g, or t
  misc_feature (53)..(54): n is a, c, g, or t
tttttttaagcagtggtatcaacgcagagtacnnggatgaagnncgatggaanntttttttttttttttttttttttttttttt

SEQ ID NO: 397 - DNA, 84 bp, Artificial
  Barcode component
  misc_feature (33)..(34): n is a, c, g, or t
  misc_feature (43)..(44): n is a, c, g, or t
  misc_feature (53)..(54): n is a, c, g, or t
tttttttaagcagtggtatcaacgcagagtacnnggatgaagnnagcaagganntttttttttttttttttttttttttttttt

SEQ ID NO: 398 - DNA, 84 bp, Artificial
  Barcode component
  misc_feature (33)..(34): n is a, c, g, or t
  misc_feature (43)..(44): n is a, c, g, or t
  misc_feature (53)..(54): n is a, c, g, or t
tttttttaagcagtggtatcaacgcagagtacnnggatgaagnncgtagcaanntttttttttttttttttttttttttttttt

SEQ ID NO: 399 - DNA, 84 bp, Artificial
  Barcode component
  misc_feature (33)..(34): n is a, c, g, or t
  misc_feature (43)..(44): n is a, c, g, or t
  misc_feature (53)..(54): n is a, c, g, or t
tttttttaagcagtggtatcaacgcagagtacnnggatgaagnntggcagtanntttttttttttttttttttttttttttttt

SEQ ID NO: 400 - DNA, 84 bp, Artificial
  Barcode component
  misc_feature (33)..(34): n is a, c, g, or t
  misc_feature (43)..(44): n is a, c, g, or t
  misc_feature (53)..(54): n is a, c, g, or t
tttttttaagcagtggtatcaacgcagagtacnnggatgaagnncggtagttnntttttttttttttttttttttttttttttt

SEQ ID NO: 401 - DNA, 84 bp, Artificial
  Barcode component
  misc_feature (33)..(34): n is a, c, g, or t
  misc_feature (43)..(44): n is a, c, g, or t
  misc_feature (53)..(54): n is a, c, g, or t
tttttttaagcagtggtatcaacgcagagtacnnggatgaagnntgacttcgnntttttttttttttttttttttttttttttt

SEQ ID NO: 402 - DNA, 84 bp, Artificial
  Barcode component
  misc_feature (33)..(34): n is a, c, g, or t
  misc_feature (43)..(44): n is a, c, g, or t
  misc_feature (53)..(54): n is a, c, g, or t
tttttttaagcagtggtatcaacgcagagtacnnggatgaagnngagtgcaanntttttttttttttttttttttttttttttt

SEQ ID NO: 403 - DNA, 84 bp, Artificial
  Barcode component
  misc_feature (33)..(34): n is a, c, g, or t
  misc_feature (43)..(44): n is a, c, g, or t
  misc_feature (53)..(54): n is a, c, g, or t
tttttttaagcagtggtatcaacgcagagtacnnggatgaagnnacggtaacnntttttttttttttttttttttttttttttt

SEQ ID NO: 404 - DNA, 84 bp, Artificial
  Barcode component
  misc_feature (33)..(34): n is a, c, g, or t
  misc_feature (43)..(44): n is a, c, g, or t
  misc_feature (53)..(54): n is a, c, g, or t
tttttttaagcagtggtatcaacgcagagtacnnggatgaagnnaagtggtgnntttttttttttttttttttttttttttttt

SEQ ID NO: 405 - DNA, 84 bp, Artificial
  Barcode component
  misc_feature (33)..(34): n is a, c, g, or t
  misc_feature (43)..(44): n is a, c, g, or t
  misc_feature (53)..(54): n is a, c, g, or t
tttttttaagcagtggtatcaacgcagagtacnnggatgaagnnggagacaanntttttttttttttttttttttttttttttt

SEQ ID NO: 406 - DNA, 84 bp, Artificial
  Barcode component
  misc_feature (33)..(34): n is a, c, g, or t
  misc_feature (43)..(44): n is a, c, g, or t
  misc_feature (53)..(54): n is a, c, g, or t
tttttttaagcagtggtatcaacgcagagtacnnggatgaagnntcaaggacnntttttttttttttttttttttttttttttt

SEQ ID NO: 407 - DNA, 84 bp, Artificial
  Barcode component
  misc_feature (33)..(34): n is a, c, g, or t
  misc_feature (43)..(44): n is a, c, g, or t
  misc_feature (53)..(54): n is a, c, g, or t
tttttttaagcagtggtatcaacgcagagtacnnggatgaagnnaagagagcnntttttttttttttttttttttttttttttt

SEQ ID NO: 408 - DNA, 84 bp, Artificial
  Barcode component
  misc_feature (33)..(34): n is a, c, g, or t
  misc_feature (43)..(44): n is a, c, g, or t
  misc_feature (53)..(54): n is a, c, g, or t
tttttttaagcagtggtatcaacgcagagtacnnggatgaagnncgagagatnntttttttttttttttttttttttttttttt

SEQ ID NO: 409 - DNA, 84 bp, Artificial
  Barcode component
  misc_feature (33)..(34): n is a, c, g, or t
  misc_feature (43)..(44): n is a, c, g, or t
  misc_feature (53)..(54): n is a, c, g, or t
tttttttaagcagtggtatcaacgcagagtacnnggatgaagnnacagatggnntttttttttttttttttttttttttttttt

SEQ ID NO: 410 - DNA, 84 bp, Artificial
  Barcode component
  misc_feature (33)..(34): n is a, c, g, or t
  misc_feature (43)..(44): n is a, c, g, or t
  misc_feature (53)..(54): n is a, c, g, or t
tttttttaagcagtggtatcaacgcagagtacnnggatgaagnnaggagtcanntttttttttttttttttttttttttttttt

SEQ ID NO: 411 - DNA, 84 bp, Artificial
  Barcode component
  misc_feature (33)..(34): n is a, c, g, or t
  misc_feature (43)..(44): n is a, c, g, or t
  misc_feature (53)..(54): n is a, c, g, or t
tttttttaagcagtggtatcaacgcagagtacnnggatgaagnncgtgttacnntttttttttttttttttttttttttttttt

SEQ ID NO: 412 - DNA, 84 bp, Artificial
  Barcode component
  misc_feature (33)..(34): n is a, c, g, or t
  misc_feature (43)..(44): n is a, c, g, or t
  misc_feature (53)..(54): n is a, c, g, or t
tttttttaagcagtggtatcaacgcagagtacnnggatgaagnntagtgtgcnntttttttttttttttttttttttttttttt

SEQ ID NO: 413 - DNA, 84 bp, Artificial
  Barcode component
  misc_feature (33)..(34): n is a, c, g, or t
  misc_feature (43)..(44): n is a, c, g, or t
  misc_feature (53)..(54): n is a, c, g, or t
tttttttaagcagtggtatcaacgcagagtacnnggatgaagnnctcatgacnntttttttttttttttttttttttttttttt

SEQ ID NO: 414 - DNA, 84 bp, Artificial
  Barcode component
  misc_feature (33)..(34): n is a, c, g, or t
  misc_feature (43)..(44): n is a, c, g, or t
  misc_feature (53)..(54): n is a, c, g, or t
tttttttaagcagtggtatcaacgcagagtacnnggatgaagnngtatccagnntttttttttttttttttttttttttttttt

SEQ ID NO: 415 - DNA, 84 bp, Artificial
  Barcode component
  misc_feature (33)..(34): n is a, c, g, or t
  misc_feature (43)..(44): n is a, c, g, or t
  misc_feature (53)..(54): n is a, c, g, or t
tttttttaagcagtggtatcaacgcagagtacnnggatgaagnnacgcctatnntttttttttttttttttttttttttttttt

SEQ ID NO: 416 - DNA, 84 bp, Artificial
  Barcode component
  misc_feature (33)..(34): n is a, c, g, or t
  misc_feature (43)..(44): n is a, c, g, or t
  misc_feature (53)..(54): n is a, c, g, or t
tttttttaagcagtggtatcaacgcagagtacnnggatgaagnnaacgacctnntttttttttttttttttttttttttttttt

SEQ ID NO: 417 - DNA, 84 bp, Artificial
  Barcode component
  misc_feature (33)..(34): n is a, c, g, or t
  misc_feature (43)..(44): n is a, c, g, or t
  misc_feature (53)..(54): n is a, c, g, or t
tttttttaagcagtggtatcaacgcagagtacnnggatgaagnnatcaggctnntttttttttttttttttttttttttttttt

SEQ ID NO: 418 - DNA, 84 bp, Artificial
  Barcode component
  misc_feature (33)..(34): n is a, c, g, or t
  misc_feature (43)..(44): n is a, c, g, or t
  misc_feature (53)..(54): n is a, c, g, or t
tttttttaagcagtggtatcaacgcagagtacnnggatgaagnncaagttcgnntttttttttttttttttttttttttttttt

SEQ ID NO: 419 - DNA, 84 bp, Artificial
  Barcode component
  misc_feature (33)..(34): n is a, c, g, or t
  misc_feature (43)..(44): n is a, c, g, or t
  misc_feature (53)..(54): n is a, c, g, or t
tttttttaagcagtggtatcaacgcagagtacnnggatgaagnntagccaganntttttttttttttttttttttttttttttt

SEQ ID NO: 420 - DNA, 84 bp, Artificial
  Barcode component
  misc_feature (33)..(34): n is a, c, g, or t
  misc_feature (43)..(44): n is a, c, g, or t
  misc_feature (53)..(54): n is a, c, g, or t
tttttttaagcagtggtatcaacgcagagtacnnggatgaagnncaatcacgnntttttttttttttttttttttttttttttt

SEQ ID NO: 421 - DNA, 84 bp, Artificial
  Barcode component
  misc_feature (33)..(34): n is a, c, g, or t
  misc_feature (43)..(44): n is a, c, g, or t
  misc_feature (53)..(54): n is a, c, g, or t
tttttttaagcagtggtatcaacgcagagtacnnggatgaagnngcaacaagnntttttttttttttttttttttttttttttt

SEQ ID NO: 422 - DNA, 84 bp, Artificial
  Barcode component
  misc_feature (33)..(34): n is a, c, g, or t
  misc_feature (43)..(44): n is a, c, g, or t
  misc_feature (53)..(54): n is a, c, g, or t
tttttttaagcagtggtatcaacgcagagtacnnggatgaagnncacgacaanntttttttttttttttttttttttttttttt

SEQ ID NO: 423 - DNA, 84 bp, Artificial
  Barcode component
  misc_feature (33)..(34): n is a, c, g, or t
  misc_feature (43)..(44): n is a, c, g, or t
  misc_feature (53)..(54): n is a, c, g, or t
tttttttaagcagtggtatcaacgcagagtacnnggatgaagnntacggaganntttttttttttttttttttttttttttttt

SEQ ID NO: 424 - DNA, 84 bp, Artificial
  Barcode component
  misc_feature (33)..(34): n is a, c, g, or t
  misc_feature (43)..(44): n is a, c, g, or t
  misc_feature (53)..(54): n is a, c, g, or t
tttttttaagcagtggtatcaacgcagagtacnnggatgaagnncgacaaganntttttttttttttttttttttttttttttt

SEQ ID NO: 425 - DNA, 84 bp, Artificial
  Barcode component
  misc_feature (33)..(34): n is a, c, g, or t
  misc_feature (43)..(44): n is a, c, g, or t
  misc_feature (53)..(54): n is a, c, g, or t
tttttttaagcagtggtatcaacgcagagtacnnggatgaagnncgaagtganntttttttttttttttttttttttttttttt

SEQ ID NO: 426 - DNA, 84 bp, Artificial
  Barcode component
  misc_feature (33)..(34): n is a, c, g, or t
  misc_feature (43)..(44): n is a, c, g, or t
  misc_feature (53)..(54): n is a, c, g, or t
tttttttaagcagtggtatcaacgcagagtacnnggatgaagnnagctggtanntttttttttttttttttttttttttttttt

SEQ ID NO: 427 - DNA, 84 bp, Artificial
  Barcode component
  misc_feature (33)..(34): n is a, c, g, or t
  misc_feature (43)..(44): n is a, c, g, or t
  misc_feature (53)..(54): n is a, c, g, or t
tttttttaagcagtggtatcaacgcagagtacnnggatgaagnnaactaggcnntttttttttttttttttttttttttttttt

SEQ ID NO: 428 - DNA, 84 bp, Artificial
  Barcode component
  misc_feature (33)..(34): n is a, c, g, or t
  misc_feature (43)..(44): n is a, c, g, or t
  misc_feature (53)..(54): n is a, c, g, or t
tttttttaagcagtggtatcaacgcagagtacnnggatgaagnncagcaagtnntttttttttttttttttttttttttttttt

SEQ ID NO: 429 - DNA, 84 bp, Artificial
  Barcode component
  misc_feature (33)..(34): n is a, c, g, or t
  misc_feature (43)..(44): n is a, c, g, or t
  misc_feature (53)..(54): n is a, c, g, or t
tttttttaagcagtggtatcaacgcagagtacnnggatgaagnnacgaggtanntttttttttttttttttttttttttttttt

SEQ ID NO: 430 - DNA, 84 bp, Artificial
  Barcode component
  misc_feature (33)..(34): n is a, c, g, or t
  misc_feature (43)..(44): n is a, c, g, or t
  misc_feature (53)..(54): n is a, c, g, or t
tttttttaagcagtggtatcaacgcagagtacnnggatgaagnncatcttccnntttttttttttttttttttttttttttttt

SEQ ID NO: 431 - DNA, 84 bp, Artificial
  Barcode component
  misc_feature (33)..(34): n is a, c, g, or t
  misc_feature (43)..(44): n is a, c, g, or t
  misc_feature (53)..(54): n is a, c, g, or t
tttttttaagcagtggtatcaacgcagagtacnnggatgaagnncctgaatcnntttttttttttttttttttttttttttttt

SEQ ID NO: 432 - DNA, 84 bp, Artificial
  Barcode component
  misc_feature (33)..(34): n is a, c, g, or t
  misc_feature (43)..(44): n is a, c, g, or t
  misc_feature (53)..(54): n is a, c, g, or t
tttttttaagcagtggtatcaacgcagagtacnnggatgaagnntgcagactnntttttttttttttttttttttttttttttt

SEQ ID NO: 433 - DNA, 84 bp, Artificial
  Barcode component
  misc_feature (33)..(34): n is a, c, g, or t
  misc_feature (43)..(44): n is a, c, g, or t
  misc_feature (53)..(54): n is a, c, g, or t
tttttttaagcagtggtatcaacgcagagtacnnggatgaagnnagatgtggnntttttttttttttttttttttttttttttt

SEQ ID NO: 434 - DNA, 84 bp, Artificial
  Barcode component
  misc_feature (33)..(34): n is a, c, g, or t
  misc_feature (43)..(44): n is a, c, g, or t
  misc_feature (53)..(54): n is a, c, g, or t
tttttttaagcagtggtatcaacgcagagtacnnggatgaagnnagttcgacnntttttttttttttttttttttttttttttt

SEQ ID NO: 435 - DNA, 84 bp, Artificial
  Barcode component
  misc_feature (33)..(34): n is a, c, g, or t
  misc_feature (43)..(44): n is a, c, g, or t
  misc_feature (53)..(54): n is a, c, g, or t
tttttttaagcagtggtatcaacgcagagtacnnggatgaagnnacaacctcnntttttttttttttttttttttttttttttt

SEQ ID NO: 436 - DNA, 84 bp, Artificial
  Barcode component
  misc_feature (33)..(34): n is a, c, g, or t
  misc_feature (43)..(44): n is a, c, g, or t
  misc_feature (53)..(54): n is a, c, g, or t
tttttttaagcagtggtatcaacgcagagtacnnggatgaagnncatggtagnntttttttttttttttttttttttttttttt

SEQ ID NO: 437 - DNA, 84 bp, Artificial
  Barcode component
  misc_feature (33)..(34): n is a, c, g, or t
  misc_feature (43)..(44): n is a, c, g, or t
  misc_feature (53)..(54): n is a, c, g, or t
tttttttaagcagtggtatcaacgcagagtacnnggatgaagnncgtatctcnntttttttttttttttttttttttttttttt

SEQ ID NO: 438 - DNA, 84 bp, Artificial
  Barcode component
  misc_feature (33)..(34): n is a, c, g, or t
  misc_feature (43)..(44): n is a, c, g, or t
  misc_feature (53)..(54): n is a, c, g, or t
tttttttaagcagtggtatcaacgcagagtacnnggatgaagnncctagttcnntttttttttttttttttttttttttttttt

SEQ ID NO: 439 - DNA, 84 bp, Artificial
  Barcode component
  misc_feature (33)..(34): n is a, c, g, or t
  misc_feature (43)..(44): n is a, c, g, or t
  misc_feature (53)..(54): n is a, c, g, or t
tttttttaagcagtggtatcaacgcagagtacnnggatgaagnncaagagtcnntttttttttttttttttttttttttttttt

SEQ ID NO: 440 - DNA, 84 bp, Artificial
  Barcode component
  misc_feature (33)..(34): n is a, c, g, or t
  misc_feature (43)..(44): n is a, c, g, or t
  misc_feature (53)..(54): n is a, c, g, or t
tttttttaagcagtggtatcaacgcagagtacnntggaggatnnaatcggcanntttttttttttttttttttttttttttttt

SEQ ID NO: 441 - DNA, 84 bp, Artificial
  Barcode component
  misc_feature (33)..(34): n is a, c, g, or t
  misc_feature (43)..(44): n is a, c, g, or t
  misc_feature (53)..(54): n is a, c, g, or t
tttttttaagcagtggtatcaacgcagagtacnntggaggatnntacggcatnntttttttttttttttttttttttttttttt

SEQ ID NO: 442 - DNA, 84 bp, Artificial
  Barcode component
  misc_feature (33)..(34): n is a, c, g, or t
  misc_feature (43)..(44): n is a, c, g, or t
  misc_feature (53)..(54): n is a, c, g, or t
tttttttaagcagtggtatcaacgcagagtacnntggaggatnnttggatcgnntttttttttttttttttttttttttttttt

SEQ ID NO: 443 - DNA, 84 bp, Artificial
  Barcode component
  misc_feature (33)..(34): n is a, c, g, or t
  misc_feature (43)..(44): n is a, c, g, or t
  misc_feature (53)..(54): n is a, c, g, or t
tttttttaagcagtggtatcaacgcagagtacnntggaggatnntggaacganntttttttttttttttttttttttttttttt

SEQ ID NO: 444 - DNA, 84 bp, Artificial
  Barcode component
  misc_feature (33)..(34): n is a, c, g, or t
  misc_feature (43)..(44): n is a, c, g, or t
  misc_feature (53)..(54): n is a, c, g, or t
tttttttaagcagtggtatcaacgcagagtacnntggaggatnnggcaatcanntttttttttttttttttttttttttttttt

SEQ ID NO: 445 - DNA, 84 bp, Artificial
  Barcode component
  misc_feature (33)..(34): n is a, c, g, or t
  misc_feature (43)..(44): n is a, c, g, or t
  misc_feature (53)..(54): n is a, c, g, or t
tttttttaagcagtggtatcaacgcagagtacnntggaggatnngaatccganntttttttttttttttttttttttttttttt

SEQ ID NO: 446 - DNA, 84 bp, Artificial
  Barcode component
  misc_feature (33)..(34): n is a, c, g, or t
  misc_feature (43)..(44): n is a, c, g, or t
  misc_feature (53)..(54): n is a, c, g, or t
tttttttaagcagtggtatcaacgcagagtacnntggaggatnnttacggtgnntttttttttttttttttttttttttttttt

SEQ ID NO: 447 - DNA, 84 bp, Artificial
  Barcode component
  misc_feature (33)..(34): n is a, c, g, or t
  misc_feature (43)..(44): n is a, c, g, or t
  misc_feature (53)..(54): n is a, c, g, or t
tttttttaagcagtggtatcaacgcagagtacnntggaggatnncatatcggnntttttttttttttttttttttttttttttt

SEQ ID NO: 448 - DNA, 84 bp, Artificial
  Barcode component
  misc_feature (33)..(34): n is a, c, g, or t
  misc_feature (43)..(44): n is a, c, g, or t
  misc_feature (53)..(54): n is a, c, g, or t
tttttttaagcagtggtatcaacgcagagtacnntggaggatnncttcggtanntttttttttttttttttttttttttttttt

SEQ ID NO: 449 - DNA, 84 bp, Artificial
  Barcode component
  misc_feature (33)..(34): n is a, c, g, or t
  misc_feature (43)..(44): n is a, c, g, or t
  misc_feature (53)..(54): n is a, c, g, or t
tttttttaagcagtggtatcaacgcagagtacnntggaggatnntcctaacgnntttttttttttttttttttttttttttttt

SEQ ID NO: 450 - DNA, 84 bp, Artificial
  Barcode component
  misc_feature (33)..(34): n is a, c, g, or t
  misc_feature (43)..(44): n is a, c, g, or t
  misc_feature (53)..(54): n is a, c, g, or t
tttttttaagcagtggtatcaacgcagagtacnntggaggatnngtaagccanntttttttttttttttttttttttttttttt

SEQ ID NO: 451 - DNA, 84 bp, Artificial
  Barcode component
  misc_feature (33)..(34): n is a, c, g, or t
  misc_feature (43)..(44): n is a, c, g, or t
  misc_feature (53)..(54): n is a, c, g, or t
tttttttaagcagtggtatcaacgcagagtacnntggaggatnntaaggtggnntttttttttttttttttttttttttttttt

SEQ ID NO: 452 - DNA, 84 bp, Artificial
  Barcode component
  misc_feature (33)..(34): n is a, c, g, or t
  misc_feature (43)..(44): n is a, c, g, or t
  misc_feature (53)..(54): n is a, c, g, or t
tttttttaagcagtggtatcaacgcagagtacnntggaggatnnggtaagctnntttttttttttttttttttttttttttttt

SEQ ID NO: 453 - DNA, 84 bp, Artificial
  Barcode component
  misc_feature (33)..(34): n is a, c, g, or t
  misc_feature (43)..(44): n is a, c, g, or t
  misc_feature (53)..(54): n is a, c, g, or t
tttttttaagcagtggtatcaacgcagagtacnntggaggatnntgtgtcganntttttttttttttttttttttttttttttt

SEQ ID NO: 454 - DNA, 84 bp, Artificial
  Barcode component
  misc_feature (33)..(34): n is a, c, g, or t
  misc_feature (43)..(44): n is a, c, g, or t
  misc_feature (53)..(54): n is a, c, g, or t
tttttttaagcagtggtatcaacgcagagtacnntggaggatnngagcatganntttttttttttttttttttttttttttttt

SEQ ID NO: 455 - DNA, 84 bp, Artificial
  Barcode component
  misc_feature (33)..(34): n is a, c, g, or t
  misc_feature (43)..(44): n is a, c, g, or t
  misc_feature (53)..(54): n is a, c, g, or t
tttttttaagcagtggtatcaacgcagagtacnntggaggatnntcgaagtcnntttttttttttttttttttttttttttttt

SEQ ID NO: 456 - DNA, 84 bp, Artificial
  Barcode component
  misc_feature (33)..(34): n is a, c, g, or t
  misc_feature (43)..(44): n is a, c, g, or t
  misc_feature (53)..(54): n is a, c, g, or t
tttttttaagcagtggtatcaacgcagagtacnntggaggatnnggtgaacanntttttttttttttttttttttttttttttt

SEQ ID NO: 457 - DNA, 84 bp, Artificial
  Barcode component
  misc_feature (33)..(34): n is a, c, g, or t
  misc_feature (43)..(44): n is a, c, g, or t
  misc_feature (53)..(54): n is a, c, g, or t
tttttttaagcagtggtatcaacgcagagtacnntggaggatnnacatgcacnntttttttttttttttttttttttttttttt

SEQ ID NO: 458 - DNA, 84 bp, Artificial
  Barcode component
  misc_feature (33)..(34): n is a, c, g, or t
  misc_feature (43)..(44): n is a, c, g, or t
  misc_feature (53)..(54): n is a, c, g, or t
tttttttaagcagtggtatcaacgcagagtacnntggaggatnnccaacagtnntttttttttttttttttttttttttttttt

SEQ ID NO: 459 - DNA, 84 bp, Artificial
  Barcode component
  misc_feature (33)..(34): n is a, c, g, or t
  misc_feature (43)..(44): n is a, c, g, or t
  misc_feature (53)..(54): n is a, c, g, or t
tttttttaagcagtggtatcaacgcagagtacnntggaggatnnagaacagcnntttttttttttttttttttttttttttttt

SEQ ID NO: 460 - DNA, 84 bp, Artificial
  Barcode component
  misc_feature (33)..(34): n is a, c, g, or t
  misc_feature (43)..(44): n is a, c, g, or t
  misc_feature (53)..(54): n is a, c, g, or t
tttttttaagcagtggtatcaacgcagagtacnntggaggatnngaacacgtnntttttttttttttttttttttttttttttt

SEQ ID NO: 461 - DNA, 84 bp, Artificial
  Barcode component
  misc_feature (33)..(34): n is a, c, g, or t
  misc_feature (43)..(44): n is a, c, g, or t
  misc_feature (53)..(54): n is a, c, g, or t
tttttttaagcagtggtatcaacgcagagtacnntggaggatnnggtcttcanntttttttttttttttttttttttttttttt

SEQ ID NO: 462 - DNA, 84 bp, Artificial
  Barcode component
  misc_feature (33)..(34): n is a, c, g, or t
  misc_feature (43)..(44): n is a, c, g, or t
  misc_feature (53)..(54): n is a, c, g, or t
tttttttaagcagtggtatcaacgcagagtacnntggaggatnnaggttcagnntttttttttttttttttttttttttttttt

SEQ ID NO: 463 - DNA, 84 bp, Artificial
  Barcode component
  misc_feature (33)..(34): n is a, c, g, or t
  misc_feature (43)..(44): n is a, c, g, or t
  misc_feature (53)..(54): n is a, c, g, or t
tttttttaagcagtggtatcaacgcagagtacnntggaggatnnctagagcanntttttttttttttttttttttttttttttt

SEQ ID NO: 464 - DNA, 84 bp, Artificial
  Barcode component
  misc_feature (33)..(34): n is a, c, g, or t
  misc_feature (43)..(44): n is a, c, g, or t
  misc_feature (53)..(54): n is a, c, g, or t
tttttttaagcagtggtatcaacgcagagtacnntggaggatnncttctagcnntttttttttttttttttttttttttttttt

SEQ ID NO: 465 - DNA, 84 bp, Artificial
  Barcode component
  misc_feature (33)..(34): n is a, c, g, or t
  misc_feature (43)..(44): n is a, c, g, or t
  misc_feature (53)..(54): n is a, c, g, or t
tttttttaagcagtggtatcaacgcagagtacnntggaggatnngagtaacgnntttttttttttttttttttttttttttttt

SEQ ID NO: 466 - DNA, 84 bp, Artificial
  Barcode component
  misc_feature (33)..(34): n is a, c, g, or t
  misc_feature (43)..(44): n is a, c, g, or t
  misc_feature (53)..(54): n is a, c, g, or t
tttttttaagcagtggtatcaacgcagagtacnntggaggatnnctaagaggnntttttttttttttttttttttttttttttt

SEQ ID NO: 467 - DNA, 84 bp, Artificial
  Barcode component
  misc_feature (33)..(34): n is a, c, g, or t
  misc_feature (43)..(44): n is a, c, g, or t
  misc_feature (53)..(54): n is a, c, g, or t
tttttttaagcagtggtatcaacgcagagtacnntggaggatnnacgtgtagnntttttttttttttttttttttttttttttt

SEQ ID NO: 468 - DNA, 84 bp, Artificial
  Barcode component
  misc_feature (33)..(34): n is a, c, g, or t
  misc_feature (43)..(44): n is a, c, g, or t
  misc_feature (53)..(54): n is a, c, g, or t
tttttttaagcagtggtatcaacgcagagtacnntggaggatnnactacaggnntttttttttttttttttttttttttttttt

SEQ ID NO: 469 - DNA, 84 bp, Artificial
  Barcode component
  misc_feature (33)..(34): n is a, c, g, or t
  misc_feature (43)..(44): n is a, c, g, or t
  misc_feature (53)..(54): n is a, c, g, or t
tttttttaagcagtggtatcaacgcagagtacnntggaggatnntacaggtcnntttttttttttttttttttttttttttttt

SEQ ID NO: 470 - DNA, 84 bp, Artificial
  Barcode component
  misc_feature (33)..(34): n is a, c, g, or t
  misc_feature (43)..(44): n is a, c, g, or t
  misc_feature (53)..(54): n is a, c, g, or t
tttttttaagcagtggtatcaacgcagagtacnntggaggatnnctcacatgnntttttttttttttttttttttttttttttt

SEQ ID NO: 471 - DNA, 84 bp, Artificial
  Barcode component
  misc_feature (33)..(34): n is a, c, g, or t
  misc_feature (43)..(44): n is a, c, g, or t
  misc_feature (53)..(54): n is a, c, g, or t
tttttttaagcagtggtatcaacgcagagtacnntggaggatnnactaggagnntttttttttttttttttttttttttttttt

SEQ ID NO: 472 - DNA, 84 bp, Artificial
  Barcode component
  misc_feature (33)..(34): n is a, c, g, or t
  misc_feature (43)..(44): n is a, c, g, or t
  misc_feature (53)..(54): n is a, c, g, or t
tttttttaagcagtggtatcaacgcagagtacnntggaggatnnccatagganntttttttttttttttttttttttttttttt

SEQ ID NO: 473 - DNA, 84 bp, Artificial
  Barcode component
  misc_feature (33)..(34): n is a, c, g, or t
  misc_feature (43)..(44): n is a, c, g, or t
  misc_feature (53)..(54): n is a, c, g, or t
tttttttaagcagtggtatcaacgcagagtacnntggaggatnnggagaatcnntttttttttttttttttttttttttttttt

SEQ ID NO: 474 - DNA, 84 bp, Artificial
  Barcode component
  misc_feature (33)..(34): n is a, c, g, or t
  misc_feature (43)..(44): n is a, c, g, or t
  misc_feature (53)..(54): n is a, c, g, or t
tttttttaagcagtggtatcaacgcagagtacnntggaggatnngccaagaanntttttttttttttttttttttttttttttt

SEQ ID NO: 475 - DNA, 84 bp, Artificial
  Barcode component
  misc_feature (33)..(34): n is a, c, g, or t
  misc_feature (43)..(44): n is a, c, g, or t
  misc_feature (53)..(54): n is a, c, g, or t
tttttttaagcagtggtatcaacgcagagtacnntggaggatnnaaggcaagnntttttttttttttttttttttttttttttt

SEQ ID NO: 476 - DNA, 84 bp, Artificial
  Barcode component
  misc_feature (33)..(34): n is a, c, g, or t
  misc_feature (43)..(44): n is a, c, g, or t
  misc_feature (53)..(54): n is a, c, g, or t
tttttttaagcagtggtatcaacgcagagtacnntggaggatnnaatgtcgcnntttttttttttttttttttttttttttttt

SEQ ID NO: 477 - DNA, 84 bp, Artificial
  Barcode component
  misc_feature (33)..(34): n is a, c, g, or t
  misc_feature (43)..(44): n is a, c, g, or t
  misc_feature (53)..(54): n is a, c, g, or t
tttttttaagcagtggtatcaacgcagagtacnntggaggatnnatggaaccnntttttttttttttttttttttttttttttt

SEQ ID NO: 478 - DNA, 84 bp, Artificial
  Barcode component
  misc_feature (33)..(34): n is a, c, g, or t
  misc_feature (43)..(44): n is a, c, g, or t
  misc_feature (53)..(54): n is a, c, g, or t
tttttttaagcagtggtatcaacgcagagtacnntggaggatnnagaggcatnntttttttttttttttttttttttttttttt

SEQ ID NO: 479 - DNA, 84 bp, Artificial
  Barcode component
  misc_feature (33)..(34): n is a, c, g, or t
  misc_feature (43)..(44): n is a, c, g, or t
  misc_feature (53)..(54): n is a, c, g, or t
tttttttaagcagtggtatcaacgcagagtacnntggaggatnntgcatagcnntttttttttttttttttttttttttttttt

SEQ ID NO: 480 - DNA, 84 bp, Artificial
  Barcode component
  misc_feature (33)..(34): n is a, c, g, or t
  misc_feature (43)..(44): n is a, c, g, or t
  misc_feature (53)..(54): n is a, c, g, or t
tttttttaagcagtggtatcaacgcagagtacnntggaggatnnctaacgganntttttttttttttttttttttttttttttt

SEQ ID NO: 481 - DNA, 84 bp, Artificial
  Barcode component
  misc_feature (33)..(34): n is a, c, g, or t
  misc_feature (43)..(44): n is a, c, g, or t
  misc_feature (53)..(54): n is a, c, g, or t
tttttttaagcagtggtatcaacgcagagtacnntggaggatnntatcgaggnntttttttttttttttttttttttttttttt

SEQ ID NO: 482 - DNA, 84 bp, Artificial
  Barcode component
  misc_feature (33)..(34): n is a, c, g, or t
  misc_feature (43)..(44): n is a, c, g, or t
  misc_feature (53)..(54): n is a, c, g, or t
tttttttaagcagtggtatcaacgcagagtacnntggaggatnncatagcctnntttttttttttttttttttttttttttttt

SEQ ID NO: 483 - DNA, 84 bp, Artificial
  Barcode component
  misc_feature (33)..(34): n is a, c, g, or t
  misc_feature (43)..(44): n is a, c, g, or t
  misc_feature (53)..(54): n is a, c, g, or t
tttttttaagcagtggtatcaacgcagagtacnntggaggatnnatcgagacnntttttttttttttttttttttttttttttt

SEQ ID NO: 484 - DNA, 84 bp, Artificial
  Barcode component
  misc_feature (33)..(34): n is a, c, g, or t
  misc_feature (43)..(44): n is a, c, g, or t
  misc_feature (53)..(54): n is a, c, g, or t
tttttttaagcagtggtatcaacgcagagtacnntggaggatnnggaagagtnntttttttttttttttttttttttttttttt

SEQ ID NO: 485 - DNA, 84 bp, Artificial
  Barcode component
  misc_feature (33)..(34): n is a, c, g, or t
  misc_feature (43)..(44): n is a, c, g, or t
  misc_feature (53)..(54): n is a, c, g, or t
tttttttaagcagtggtatcaacgcagagtacnntggaggatnnccaagtagnntttttttttttttttttttttttttttttt

SEQ ID NO: 486 - DNA, 84 bp, Artificial
  Barcode component
  misc_feature (33)..(34): n is a, c, g, or t
  misc_feature (43)..(44): n is a, c, g, or t
  misc_feature (53)..(54): n is a, c, g, or t
tttttttaagcagtggtatcaacgcagagtacnntggaggatnnctgaacagnntttttttttttttttttttttttttttttt

SEQ ID NO: 487 - DNA, 84 bp, Artificial
  Barcode component
  misc_feature (33)..(34): n is a, c, g, or t
  misc_feature (43)..(44): n is a, c, g, or t
  misc_feature (53)..(54): n is a, c, g, or t
tttttttaagcagtggtatcaacgcagagtacnntggaggatnngtaggttcnntttttttttttttttttttttttttttttt

SEQ ID NO: 488 - DNA, 84 bp, Artificial
  Barcode component
  misc_feature (33)..(34): n is a, c, g, or t
  misc_feature (43)..(44): n is a, c, g, or t
  misc_feature (53)..(54): n is a, c, g, or t
tttttttaagcagtggtatcaacgcagagtacnntggaggatnngtatggacnntttttttttttttttttttttttttttttt

SEQ ID NO: 489 - DNA, 84 bp, Artificial
  Barcode component
  misc_feature (33)..(34): n is a, c, g, or t
  misc_feature (43)..(44): n is a, c, g, or t
  misc_feature (53)..(54): n is a, c, g, or t
tttttttaagcagtggtatcaacgcagagtacnntggaggatnntcgcaacanntttttttttttttttttttttttttttttt

SEQ ID NO: 490 - DNA, 84 bp, Artificial
  Barcode component
  misc_feature (33)..(34): n is a, c, g, or t
  misc_feature (43)..(44): n is a, c, g, or t
  misc_feature (53)..(54): n is a, c, g, or t
tttttttaagcagtggtatcaacgcagagtacnntggaggatnnccgctaatnntttttttttttttttttttttttttttttt

SEQ ID NO: 491 - DNA, 84 bp, Artificial
  Barcode component
  misc_feature (33)..(34): n is a, c, g, or t
  misc_feature (43)..(44): n is a, c, g, or t
  misc_feature (53)..(54): n is a, c, g, or t
tttttttaagcagtggtatcaacgcagagtacnntggaggatnngattcgcanntttttttttttttttttttttttttttttt

SEQ ID NO: 492 - DNA, 84 bp, Artificial
  Barcode component
  misc_feature (33)..(34): n is a, c, g, or t
  misc_feature (43)..(44): n is a, c, g, or t
  misc_feature (53)..(54): n is a, c, g, or t
tttttttaagcagtggtatcaacgcagagtacnntggaggatnncgatggaanntttttttttttttttttttttttttttttt

SEQ ID NO: 493 - DNA, 84 bp, Artificial
  Barcode component
  misc_feature (33)..(34): n is a, c, g, or t
  misc_feature (43)..(44): n is a, c, g, or t
  misc_feature (53)..(54): n is a, c, g, or t
tttttttaagcagtggtatcaacgcagagtacnntggaggatnnagcaagganntttttttttttttttttttttttttttttt

SEQ ID NO: 494 - DNA, 84 bp, Artificial
  Barcode component
  misc_feature (33)..(34): n is a, c, g, or t
  misc_feature (43)..(44): n is a, c, g, or t
  misc_feature (53)..(54): n is a, c, g, or t
tttttttaagcagtggtatcaacgcagagtacnntggaggatnncgtagcaanntttttttttttttttttttttttttttttt

SEQ ID NO: 495 - DNA, 84 bp, Artificial
  Barcode component
  misc_feature (33)..(34): n is a, c, g, or t
  misc_feature (43)..(44): n is a, c, g, or t
  misc_feature (53)..(54): n is a, c, g, or t
tttttttaagcagtggtatcaacgcagagtacnntggaggatnntggcagtanntttttttttttttttttttttttttttttt

SEQ ID NO: 496 - DNA, 84 bp, Artificial
  Barcode component
  misc_feature (33)..(34): n is a, c, g, or t
  misc_feature (43)..(44): n is a, c, g, or t
  misc_feature (53)..(54): n is a, c, g, or t
tttttttaagcagtggtatcaacgcagagtacnntggaggatnncggtagttnntttttttttttttttttttttttttttttt

SEQ ID NO: 497 - DNA, 84 bp, Artificial
  Barcode component
  misc_feature (33)..(34): n is a, c, g, or t
  misc_feature (43)..(44): n is a, c, g, or t
  misc_feature (53)..(54): n is a, c, g, or t
tttttttaagcagtggtatcaacgcagagtacnntggaggatnntgacttcgnntttttttttttttttttttttttttttttt

SEQ ID NO: 498 - DNA, 84 bp, Artificial
  Barcode component
  misc_feature (33)..(34): n is a, c, g, or t
  misc_feature (43)..(44): n is a, c, g, or t
  misc_feature (53)..(54): n is a, c, g, or t
tttttttaagcagtggtatcaacgcagagtacnntggaggatnngagtgcaanntttttttttttttttttttttttttttttt

SEQ ID NO: 499 - DNA, 84 bp, Artificial
  Barcode component
  misc_feature (33)..(34): n is a, c, g, or t
  misc_feature (43)..(44): n is a, c, g, or t
  misc_feature (53)..(54): n is a, c, g, or t
tttttttaagcagtggtatcaacgcagagtacnntggaggatnnacggtaacnntttttttttttttttttttttttttttttt

SEQ ID NO: 500 - DNA, 84 bp, Artificial
  Barcode component
  misc_feature (33)..(34): n is a, c, g, or t
  misc_feature (43)..(44): n is a, c, g, or t
  misc_feature (53)..(54): n is a, c, g, or t
tttttttaagcagtggtatcaacgcagagtacnntggaggatnnaagtggtgnntttttttttttttttttttttttttttttt

SEQ ID NO: 501 - DNA, 84 bp, Artificial
  Barcode component
  misc_feature (33)..(34): n is a, c, g, or t
  misc_feature (43)..(44): n is a, c, g, or t
  misc_feature (53)..(54): n is a, c, g, or t
tttttttaagcagtggtatcaacgcagagtacnntggaggatnnggagacaanntttttttttttttttttttttttttttttt

SEQ ID NO: 502 - DNA, 84 bp, Artificial
  Barcode component
  misc_feature (33)..(34): n is a, c, g, or t
  misc_feature (43)..(44): n is a, c, g, or t
  misc_feature (53)..(54): n is a, c, g, or t
tttttttaagcagtggtatcaacgcagagtacnntggaggatnntcaaggacnntttttttttttttttttttttttttttttt

SEQ ID NO: 503 - DNA, 84 bp, Artificial
  Barcode component
  misc_feature (33)..(34): n is a, c, g, or t
  misc_feature (43)..(44): n is a, c, g, or t
  misc_feature (53)..(54): n is a, c, g, or t
tttttttaagcagtggtatcaacgcagagtacnntggaggatnnaagagagcnntttttttttttttttttttttttttttttt

SEQ ID NO: 504 - DNA, 84 bp, Artificial
  Barcode component
  misc_feature (33)..(34): n is a, c, g, or t
  misc_feature (43)..(44): n is a, c, g, or t
  misc_feature (53)..(54): n is a, c, g, or t
tttttttaagcagtggtatcaacgcagagtacnntggaggatnncgagagatnntttttttttttttttttttttttttttttt

SEQ ID NO: 505 - DNA, 84 bp, Artificial
  Barcode component
  misc_feature (33)..(34): n is a, c, g, or t
  misc_feature (43)..(44): n is a, c, g, or t
  misc_feature (53)..(54): n is a, c, g, or t
tttttttaagcagtggtatcaacgcagagtacnntggaggatnnacagatggnntttttttttttttttttttttttttttttt

SEQ ID NO: 506 - DNA, 84 bp, Artificial
  Barcode component
  misc_feature (33)..(34): n is a, c, g, or t
  misc_feature (43)..(44): n is a, c, g, or t
  misc_feature (53)..(54): n is a, c, g, or t
tttttttaagcagtggtatcaacgcagagtacnntggaggatnnaggagtcanntttttttttttttttttttttttttttttt

SEQ ID NO: 507 - DNA, 84 bp, Artificial
  Barcode component
  misc_feature (33)..(34): n is a, c, g, or t
  misc_feature (43)..(44): n is a, c, g, or t
  misc_feature (53)..(54): n is a, c, g, or t
tttttttaagcagtggtatcaacgcagagtacnntggaggatnncgtgttacnntttttttttttttttttttttttttttttt

SEQ ID NO: 508 - DNA, 84 bp, Artificial
  Barcode component
  misc_feature (33)..(34): n is a, c, g, or t
  misc_feature (43)..(44): n is a, c, g, or t
  misc_feature (53)..(54): n is a, c, g, or t
tttttttaagcagtggtatcaacgcagagtacnntggaggatnntagtgtgcnntttttttttttttttttttttttttttttt

SEQ ID NO: 509 - DNA, 84 bp, Artificial
  Barcode component
  misc_feature (33)..(34): n is a, c, g, or t
  misc_feature (43)..(44): n is a, c, g, or t
  misc_feature (53)..(54): n is a, c, g, or t
tttttttaagcagtggtatcaacgcagagtacnntggaggatnnctcatgacnntttttttttttttttttttttttttttttt

SEQ ID NO: 510 - DNA, 84 bp, Artificial
  Barcode component
  misc_feature (33)..(34): n is a, c, g, or t
  misc_feature (43)..(44): n is a, c, g, or t
  misc_feature (53)..(54): n is a, c, g, or t
tttttttaagcagtggtatcaacgcagagtacnntggaggatnngtatccagnntttttttttttttttttttttttttttttt

SEQ ID NO: 511 - DNA, 84 bp, Artificial
  Barcode component
  misc_feature (33)..(34): n is a, c, g, or t
  misc_feature (43)..(44): n is a, c, g, or t
  misc_feature (53)..(54): n is a, c, g, or t
tttttttaagcagtggtatcaacgcagagtacnntggaggatnnacgcctatnntttttttttttttttttttttttttttttt

SEQ ID NO: 512 - DNA, 84 bp, Artificial
  Barcode component
  misc_feature (33)..(34): n is a, c, g, or t
  misc_feature (43)..(44): n is a, c, g, or t
  misc_feature (53)..(54): n is a, c, g, or t
tttttttaagcagtggtatcaacgcagagtacnntggaggatnnaacgacctnntttttttttttttttttttttttttttttt

SEQ ID NO: 513 - DNA, 84 bp, Artificial
  Barcode component
  misc_feature (33)..(34): n is a, c, g, or t
  misc_feature (43)..(44): n is a, c, g, or t
  misc_feature (53)..(54): n is a, c, g, or t
tttttttaagcagtggtatcaacgcagagtacnntggaggatnnatcaggctnntttttttttttttttttttttttttttttt

SEQ ID NO: 514 - DNA, 84 bp, Artificial
  Barcode component
  misc_feature (33)..(34): n is a, c, g, or t
  misc_feature (43)..(44): n is a, c, g, or t
  misc_feature (53)..(54): n is a, c, g, or t
tttttttaagcagtggtatcaacgcagagtacnntggaggatnncaagttcgnntttttttttttttttttttttttttttttt

SEQ ID NO: 515 - DNA, 84 bp, Artificial
  Barcode component
  misc_feature (33)..(34): n is a, c, g, or t
  misc_feature (43)..(44): n is a, c, g, or t
  misc_feature (53)..(54): n is a, c, g, or t
tttttttaagcagtggtatcaacgcagagtacnntggaggatnntagccaganntttttttttttttttttttttttttttttt

SEQ ID NO: 516 - DNA, 84 bp, Artificial
  Barcode component
  misc_feature (33)..(34): n is a, c, g, or t
  misc_feature (43)..(44): n is a, c, g, or t
  misc_feature (53)..(54): n is a, c, g, or t
tttttttaagcagtggtatcaacgcagagtacnntggaggatnncaatcacgnntttttttttttttttttttttttttttttt

SEQ ID NO: 517 - DNA, 84 bp, Artificial
  Barcode component
  misc_feature (33)..(34): n is a, c, g, or t
  misc_feature (43)..(44): n is a, c, g, or t
  misc_feature (53)..(54): n is a, c, g, or t
tttttttaagcagtggtatcaacgcagagtacnntggaggatnngcaacaagnntttttttttttttttttttttttttttttt

SEQ ID NO: 518 - DNA, 84 bp, Artificial
  Barcode component
  misc_feature (33)..(34): n is a, c, g, or t
  misc_feature (43)..(44): n is a, c, g, or t
  misc_feature (53)..(54): n is a, c, g, or t
tttttttaagcagtggtatcaacgcagagtacnntggaggatnncacgacaanntttttttttttttttttttttttttttttt

SEQ ID NO: 519 - DNA, 84 bp, Artificial
  Barcode component
  misc_feature (33)..(34): n is a, c, g, or t
  misc_feature (43)..(44): n is a, c, g, or t
  misc_feature (53)..(54): n is a, c, g, or t
tttttttaagcagtggtatcaacgcagagtacnntggaggatnntacggaganntttttttttttttttttttttttttttttt

SEQ ID NO: 520 - DNA, 84 bp, Artificial
  Barcode component
  misc_feature (33)..(34): n is a, c, g, or t
  misc_feature (43)..(44): n is a, c, g, or t
  misc_feature (53)..(54): n is a, c, g, or t
tttttttaagcagtggtatcaacgcagagtacnntggaggatnncgacaaganntttttttttttttttttttttttttttttt

SEQ ID NO: 521 - DNA, 84 bp, Artificial
  Barcode component
  misc_feature (33)..(34): n is a, c, g, or t
  misc_feature (43)..(44): n is a, c, g, or t
  misc_feature (53)..(54): n is a, c, g, or t
tttttttaagcagtggtatcaacgcagagtacnntggaggatnncgaagtganntttttttttttttttttttttttttttttt

SEQ ID NO: 522 - DNA, 84 bp, Artificial
  Barcode component
  misc_feature (33)..(34): n is a, c, g, or t
  misc_feature (43)..(44): n is a, c, g, or t
  misc_feature (53)..(54): n is a, c, g, or t
tttttttaagcagtggtatcaacgcagagtacnntggaggatnnagctggtanntttttttttttttttttttttttttttttt

SEQ ID NO: 523 - DNA, 84 bp, Artificial
  Barcode component
  misc_feature (33)..(34): n is a, c, g, or t
  misc_feature (43)..(44): n is a, c, g, or t
  misc_feature (53)..(54): n is a, c, g, or t
tttttttaagcagtggtatcaacgcagagtacnntggaggatnnaactaggcnntttttttttttttttttttttttttttttt

SEQ ID NO: 524 - DNA, 84 bp, Artificial
  Barcode component
  misc_feature (33)..(34): n is a, c, g, or t
  misc_feature (43)..(44): n is a, c, g, or t
  misc_feature (53)..(54): n is a, c, g, or t
tttttttaagcagtggtatcaacgcagagtacnntggaggatnncagcaagtnntttttttttttttttttttttttttttttt

SEQ ID NO: 525 - DNA, 84 bp, Artificial
  Barcode component
  misc_feature (33)..(34): n is a, c, g, or t
  misc_feature (43)..(44): n is a, c, g, or t
  misc_feature (53)..(54): n is a, c, g, or t
tttttttaagcagtggtatcaacgcagagtacnntggaggatnnacgaggtanntttttttttttttttttttttttttttttt

SEQ ID NO: 526 - DNA, 84 bp, Artificial
  Barcode component
  misc_feature (33)..(34): n is a, c, g, or t
  misc_feature (43)..(44): n is a, c, g, or t
  misc_feature (53)..(54): n is a, c, g, or t
tttttttaagcagtggtatcaacgcagagtacnntggaggatnncatcttccnntttttttttttttttttttttttttttttt

SEQ ID NO: 527 - DNA, 84 bp, Artificial
  Barcode component
  misc_feature (33)..(34): n is a, c, g, or t
  misc_feature (43)..(44): n is a, c, g, or t
  misc_feature (53)..(54): n is a, c, g, or t
tttttttaagcagtggtatcaacgcagagtacnntggaggatnncctgaatcnntttttttttttttttttttttttttttttt

SEQ ID NO: 528 - DNA, 84 bp, Artificial
  Barcode component
  misc_feature (33)..(34): n is a, c, g, or t
  misc_feature (43)..(44): n is a, c, g, or t
  misc_feature (53)..(54): n is a, c, g, or t
tttttttaagcagtggtatcaacgcagagtacnntggaggatnntgcagactnntttttttttttttttttttttttttttttt

SEQ ID NO: 529 - DNA, 84 bp, Artificial
  Barcode component
  misc_feature (33)..(34): n is a, c, g, or t
  misc_feature (43)..(44): n is a, c, g, or t
  misc_feature (53)..(54): n is a, c, g, or t
tttttttaagcagtggtatcaacgcagagtacnntggaggatnnagatgtggnntttttttttttttttttttttttttttttt

SEQ ID NO: 530 - DNA, 84 bp, Artificial
  Barcode component
  misc_feature (33)..(34): n is a, c, g, or t
  misc_feature (43)..(44): n is a, c, g, or t
  misc_feature (53)..(54): n is a, c, g, or t
tttttttaagcagtggtatcaacgcagagtacnntggaggatnnagttcgacnntttttttttttttttttttttttttttttt

SEQ ID NO: 531 - DNA, 84 bp, Artificial
  Barcode component
  misc_feature (33)..(34): n is a, c, g, or t
  misc_feature (43)..(44): n is a, c, g, or t
  misc_feature (53)..(54): n is a, c, g, or t
tttttttaagcagtggtatcaacgcagagtacnntggaggatnnacaacctcnntttttttttttttttttttttttttttttt

SEQ ID NO: 532 - DNA, 84 bp, Artificial
  Barcode component
  misc_feature (33)..(34): n is a, c, g, or t
  misc_feature (43)..(44): n is a, c, g, or t
  misc_feature (53)..(54): n is a, c, g, or t
tttttttaagcagtggtatcaacgcagagtacnntggaggatnncatggtagnntttttttttttttttttttttttttttttt

SEQ ID NO: 533 - DNA, 84 bp, Artificial
  Barcode component
  misc_feature (33)..(34): n is a, c, g, or t
  misc_feature (43)..(44): n is a, c, g, or t
  misc_feature (53)..(54): n is a, c, g, or t
tttttttaagcagtggtatcaacgcagagtacnntggaggatnncgtatctcnntttttttttttttttttttttttttttttt

SEQ ID NO: 534 - DNA, 84 bp, Artificial
  Barcode component
  misc_feature (33)..(34): n is a, c, g, or t
  misc_feature (43)..(44): n is a, c, g, or t
  misc_feature (53)..(54): n is a, c, g, or t
tttttttaagcagtggtatcaacgcagagtacnntggaggatnncctagttcnntttttttttttttttttttttttttttttt

SEQ ID NO: 535 - DNA, 84 bp, Artificial
  Barcode component
  misc_feature (33)..(34): n is a, c, g, or t
  misc_feature (43)..(44): n is a, c, g, or t
  misc_feature (53)..(54): n is a, c, g, or t
tttttttaagcagtggtatcaacgcagagtacnntggaggatnncaagagtcnntttttttttttttttttttttttttttttt

SEQ ID NO: 536 - DNA, 84 bp, Artificial
  Barcode component
  misc_feature (33)..(34): n is a, c, g, or t
  misc_feature (43)..(44): n is a, c, g, or t
  misc_feature (53)..(54): n is a, c, g, or t
tttttttaagcagtggtatcaacgcagagtacnnaggtaaggnnaatcggcanntttttttttttttttttttttttttttttt

SEQ ID NO: 537 - DNA, 84 bp, Artificial
  Barcode component
  misc_feature (33)..(34): n is a, c, g, or t
  misc_feature (43)..(44): n is a, c, g, or t
  misc_feature (53)..(54): n is a, c, g, or t
tttttttaagcagtggtatcaacgcagagtacnnaggtaaggnntacggcatnntttttttttttttttttttttttttttttt

SEQ ID NO: 538 - DNA, 84 bp, Artificial
  Barcode component
  misc_feature (33)..(34): n is a, c, g, or t
  misc_feature (43)..(44): n is a, c, g, or t
  misc_feature (53)..(54): n is a, c, g, or t
tttttttaagcagtggtatcaacgcagagtacnnaggtaaggnnttggatcgnntttttttttttttttttttttttttttttt

SEQ ID NO: 539 - DNA, 84 bp, Artificial
  Barcode component
  misc_feature (33)..(34): n is a, c, g, or t
  misc_feature (43)..(44): n is a, c, g, or t
  misc_feature (53)..(54): n is a, c, g, or t
tttttttaagcagtggtatcaacgcagagtacnnaggtaaggnntggaacganntttttttttttttttttttttttttttttt

SEQ ID NO: 540 - DNA, 84 bp, Artificial
  Barcode component
  misc_feature (33)..(34): n is a, c, g, or t
  misc_feature (43)..(44): n is a, c, g, or t
  misc_feature (53)..(54): n is a, c, g, or t
tttttttaagcagtggtatcaacgcagagtacnnaggtaaggnnggcaatcanntttttttttttttttttttttttttttttt

SEQ ID NO: 541 - DNA, 84 bp, Artificial
  Barcode component
  misc_feature (33)..(34): n is a, c, g, or t
  misc_feature (43)..(44): n is a, c, g, or t
  misc_feature (53)..(54): n is a, c, g, or t
tttttttaagcagtggtatcaacgcagagtacnnaggtaaggnngaatccganntttttttttttttttttttttttttttttt

SEQ ID NO: 542 - DNA, 84 bp, Artificial
  Barcode component
  misc_feature (33)..(34): n is a, c, g, or t
  misc_feature (43)..(44): n is a, c, g, or t
  misc_feature (53)..(54): n is a, c, g, or t
tttttttaagcagtggtatcaacgcagagtacnnaggtaaggnnttacggtgnntttttttttttttttttttttttttttttt

SEQ ID NO: 543 - DNA, 84 bp, Artificial
  Barcode component
  misc_feature (33)..(34): n is a, c, g, or t
  misc_feature (43)..(44): n is a, c, g, or t
  misc_feature (53)..(54): n is a, c, g, or t
tttttttaagcagtggtatcaacgcagagtacnnaggtaaggnncatatcggnntttttttttttttttttttttttttttttt

SEQ ID NO: 544 - DNA, 84 bp, Artificial
  Barcode component
  misc_feature (33)..(34): n is a, c, g, or t
  misc_feature (43)..(44): n is a, c, g, or t
  misc_feature (53)..(54): n is a, c, g, or t
tttttttaagcagtggtatcaacgcagagtacnnaggtaaggnncttcggtanntttttttttttttttttttttttttttttt

SEQ ID NO: 545 - DNA, 84 bp, Artificial
  Barcode component
  misc_feature (33)..(34): n is a, c, g, or t
  misc_feature (43)..(44): n is a, c, g, or t
  misc_feature (53)..(54): n is a, c, g, or t
tttttttaagcagtggtatcaacgcagagtacnnaggtaaggnntcctaacgnntttttttttttttttttttttttttttttt

SEQ ID NO: 546 - DNA, 84 bp, Artificial
  Barcode component
  misc_feature (33)..(34): n is a, c, g, or t
  misc_feature (43)..(44): n is a, c, g, or t
  misc_feature (53)..(54): n is a, c, g, or t
tttttttaagcagtggtatcaacgcagagtacnnaggtaaggnngtaagccanntttttttttttttttttttttttttttttt

SEQ ID NO: 547 - DNA, 84 bp, Artificial
  Barcode component
  misc_feature (33)..(34): n is a, c, g, or t
  misc_feature (43)..(44): n is a, c, g, or t
  misc_feature (53)..(54): n is a, c, g, or t
tttttttaagcagtggtatcaacgcagagtacnnaggtaaggnntaaggtggnntttttttttttttttttttttttttttttt

SEQ ID NO: 548 - DNA, 84 bp, Artificial
  Barcode component
  misc_feature (33)..(34): n is a, c, g, or t
  misc_feature (43)..(44): n is a, c, g, or t
  misc_feature (53)..(54): n is a, c, g, or t
tttttttaagcagtggtatcaacgcagagtacnnaggtaaggnnggtaagctnntttttttttttttttttttttttttttttt

SEQ ID NO: 549 - DNA, 84 bp, Artificial
  Barcode component
  misc_feature (33)..(34): n is a, c, g, or t
  misc_feature (43)..(44): n is a, c, g, or t
  misc_feature (53)..(54): n is a, c, g, or t
tttttttaagcagtggtatcaacgcagagtacnnaggtaaggnntgtgtcganntttttttttttttttttttttttttttttt

SEQ ID NO: 550 - DNA, 84 bp, Artificial
  Barcode component
  misc_feature (33)..(34): n is a, c, g, or t
  misc_feature (43)..(44): n is a, c, g, or t
  misc_feature (53)..(54): n is a, c, g, or t
tttttttaagcagtggtatcaacgcagagtacnnaggtaaggnngagcatganntttttttttttttttttttttttttttttt

SEQ ID NO: 551 - DNA, 84 bp, Artificial
  Barcode component
  misc_feature (33)..(34): n is a, c, g, or t
  misc_feature (43)..(44): n is a, c, g, or t
  misc_feature (53)..(54): n is a, c, g, or t
tttttttaagcagtggtatcaacgcagagtacnnaggtaaggnntcgaagtcnntttttttttttttttttttttttttttttt

SEQ ID NO: 552 - DNA, 84 bp, Artificial
  Barcode component
  misc_feature (33)..(34): n is a, c, g, or t
  misc_feature (43)..(44): n is a, c, g, or t
  misc_feature (53)..(54): n is a, c, g, or t
tttttttaagcagtggtatcaacgcagagtacnnaggtaaggnnggtgaacanntttttttttttttttttttttttttttttt

SEQ ID NO: 553 - DNA, 84 bp, Artificial
  Barcode component
  misc_feature (33)..(34): n is a, c, g, or t
  misc_feature (43)..(44): n is a, c, g, or t
  misc_feature (53)..(54): n is a, c, g, or t
tttttttaagcagtggtatcaacgcagagtacnnaggtaaggnnacatgcacnntttttttttttttttttttttttttttttt

SEQ ID NO: 554 - DNA, 84 bp, Artificial
  Barcode component
  misc_feature (33)..(34): n is a, c, g, or t
  misc_feature (43)..(44): n is a, c, g, or t
  misc_feature (53)..(54): n is a, c, g, or t
tttttttaagcagtggtatcaacgcagagtacnnaggtaaggnnccaacagtnntttttttttttttttttttttttttttttt

SEQ ID NO: 555 - DNA, 84 bp, Artificial
  Barcode component
  misc_feature (33)..(34): n is a, c, g, or t
  misc_feature (43)..(44): n is a, c, g, or t
  misc_feature (53)..(54): n is a, c, g, or t
tttttttaagcagtggtatcaacgcagagtacnnaggtaaggnnagaacagcnntttttttttttttttttttttttttttttt

SEQ ID NO: 556 - DNA, 84 bp, Artificial
  Barcode component
  misc_feature (33)..(34): n is a, c, g, or t
  misc_feature (43)..(44): n is a, c, g, or t
  misc_feature (53)..(54): n is a, c, g, or t
tttttttaagcagtggtatcaacgcagagtacnnaggtaaggnngaacacgtnntttttttttttttttttttttttttttttt

SEQ ID NO: 557 - DNA, 84 bp, Artificial
  Barcode component
  misc_feature (33)..(34): n is a, c, g, or t
  misc_feature (43)..(44): n is a, c, g, or t
  misc_feature (53)..(54): n is a, c, g, or t
tttttttaagcagtggtatcaacgcagagtacnnaggtaaggnnggtcttcanntttttttttttttttttttttttttttttt

SEQ ID NO: 558 - DNA, 84 bp, Artificial
  Barcode component
  misc_feature (33)..(34): n is a, c, g, or t
  misc_feature (43)..(44): n is a, c, g, or t
  misc_feature (53)..(54): n is a, c, g, or t
tttttttaagcagtggtatcaacgcagagtacnnaggtaaggnnaggttcagnntttttttttttttttttttttttttttttt

SEQ ID NO: 559 - DNA, 84 bp, Artificial
  Barcode component
  misc_feature (33)..(34): n is a, c, g, or t
  misc_feature (43)..(44): n is a, c, g, or t
  misc_feature (53)..(54): n is a, c, g, or t
tttttttaagcagtggtatcaacgcagagtacnnaggtaaggnnctagagcanntttttttttttttttttttttttttttttt

SEQ ID NO: 560 - DNA, 84 bp, Artificial
  Barcode component
  misc_feature (33)..(34): n is a, c, g, or t
  misc_feature (43)..(44): n is a, c, g, or t
  misc_feature (53)..(54): n is a, c, g, or t
tttttttaagcagtggtatcaacgcagagtacnnaggtaaggnncttctagcnntttttttttttttttttttttttttttttt

SEQ ID NO: 561 - DNA, 84 bp, Artificial
  Barcode component
  misc_feature (33)..(34): n is a, c, g, or t
  misc_feature (43)..(44): n is a, c, g, or t
  misc_feature (53)..(54): n is a, c, g, or t
tttttttaagcagtggtatcaacgcagagtacnnaggtaaggnngagtaacgnntttttttttttttttttttttttttttttt

SEQ ID NO: 562 - DNA, 84 bp, Artificial
  Barcode component
  misc_feature (33)..(34): n is a, c, g, or t
  misc_feature (43)..(44): n is a, c, g, or t
  misc_feature (53)..(54): n is a, c, g, or t
tttttttaagcagtggtatcaacgcagagtacnnaggtaaggnnctaagaggnntttttttttttttttttttttttttttttt

SEQ ID NO: 563 - DNA, 84 bp, Artificial
  Barcode component
  misc_feature (33)..(34): n is a, c, g, or t
  misc_feature (43)..(44): n is a, c, g, or t
  misc_feature (53)..(54): n is a, c, g, or t
tttttttaagcagtggtatcaacgcagagtacnnaggtaaggnnacgtgtagnntttttttttttttttttttttttttttttt

SEQ ID NO: 564 - DNA, 84 bp, Artificial
  Barcode component
  misc_feature (33)..(34): n is a, c, g, or t
  misc_feature (43)..(44): n is a, c, g, or t
  misc_feature (53)..(54): n is a, c, g, or t
tttttttaagcagtggtatcaacgcagagtacnnaggtaaggnnactacaggnntttttttttttttttttttttttttttttt

SEQ ID NO: 565 - DNA, 84 bp, Artificial
  Barcode component
  misc_feature (33)..(34): n is a, c, g, or t
  misc_feature (43)..(44): n is a, c, g, or t
  misc_feature (53)..(54): n is a, c, g, or t
tttttttaagcagtggtatcaacgcagagtacnnaggtaaggnntacaggtcnntttttttttttttttttttttttttttttt

SEQ ID NO: 566 - DNA, 84 bp, Artificial
  Barcode component
  misc_feature (33)..(34): n is a, c, g, or t
  misc_feature (43)..(44): n is a, c, g, or t
  misc_feature (53)..(54): n is a, c, g, or t
tttttttaagcagtggtatcaacgcagagtacnnaggtaaggnnctcacatgnntttttttttttttttttttttttttttttt

SEQ ID NO: 567 - DNA, 84 bp, Artificial
  Barcode component
  misc_feature (33)..(34): n is a, c, g, or t
  misc_feature (43)..(44): n is a, c, g, or t
  misc_feature (53)..(54): n is a, c, g, or t
tttttttaagcagtggtatcaacgcagagtacnnaggtaaggnnactaggagnntttttttttttttttttttttttttttttt

SEQ ID NO: 568 - DNA, 84 bp, Artificial
  Barcode component
  misc_feature (33)..(34): n is a, c, g, or t
  misc_feature (43)..(44): n is a, c, g, or t
  misc_feature (53)..(54): n is a, c, g, or t
tttttttaagcagtggtatcaacgcagagtacnnaggtaaggnnccatagganntttttttttttttttttttttttttttttt

SEQ ID NO: 569 - DNA, 84 bp, Artificial
  Barcode component
  misc_feature (33)..(34): n is a, c, g, or t
  misc_feature (43)..(44): n is a, c, g, or t
  misc_feature (53)..(54): n is a, c, g, or t
tttttttaagcagtggtatcaacgcagagtacnnaggtaaggnnggagaatcnntttttttttttttttttttttttttttttt

SEQ ID NO: 570 - DNA, 84 bp, Artificial
  Barcode component
  misc_feature (33)..(34): n is a, c, g, or t
  misc_feature (43)..(44): n is a, c, g, or t
  misc_feature (53)..(54): n is a, c, g, or t
tttttttaagcagtggtatcaacgcagagtacnnaggtaaggnngccaagaanntttttttttttttttttttttttttttttt

SEQ ID NO: 571 - DNA, 84 bp, Artificial
  Barcode component
  misc_feature (33)..(34): n is a, c, g, or t
  misc_feature (43)..(44): n is a, c, g, or t
  misc_feature (53)..(54): n is a, c, g, or t
tttttttaagcagtggtatcaacgcagagtacnnaggtaaggnnaaggcaagnntttttttttttttttttttttttttttttt

SEQ ID NO: 572 - DNA, 84 bp, Artificial
  Barcode component
  misc_feature (33)..(34): n is a, c, g, or t
  misc_feature (43)..(44): n is a, c, g, or t
  misc_feature (53)..(54): n is a, c, g, or t
tttttttaagcagtggtatcaacgcagagtacnnaggtaaggnnaatgtcgcnntttttttttttttttttttttttttttttt

SEQ ID NO: 573 - DNA, 84 bp, Artificial
  Barcode component
  misc_feature (33)..(34): n is a, c, g, or t
  misc_feature (43)..(44): n is a, c, g, or t
  misc_feature (53)..(54): n is a, c, g, or t
tttttttaagcagtggtatcaacgcagagtacnnaggtaaggnnatggaaccnntttttttttttttttttttttttttttttt

SEQ ID NO: 574 - DNA, 84 bp, Artificial
  Barcode component
  misc_feature (33)..(34): n is a, c, g, or t
  misc_feature (43)..(44): n is a, c, g, or t
  misc_feature (53)..(54): n is a, c, g, or t
tttttttaagcagtggtatcaacgcagagtacnnaggtaaggnnagaggcatnntttttttttttttttttttttttttttttt

SEQ ID NO: 575 - DNA, 84 bp, Artificial
  Barcode component
  misc_feature (33)..(34): n is a, c, g, or t
  misc_feature (43)..(44): n is a, c, g, or t
  misc_feature (53)..(54): n is a, c, g, or t
tttttttaagcagtggtatcaacgcagagtacnnaggtaaggnntgcatagcnntttttttttttttttttttttttttttttt

SEQ ID NO: 576 - DNA, 84 bp, Artificial
  Barcode component
  misc_feature (33)..(34): n is a, c, g, or t
  misc_feature (43)..(44): n is a, c, g, or t
  misc_feature (53)..(54): n is a, c, g, or t
tttttttaagcagtggtatcaacgcagagtacnnaggtaaggnnctaacgganntttttttttttttttttttttttttttttt

SEQ ID NO: 577 - DNA, 84 bp, Artificial
  Barcode component
  misc_feature (33)..(34): n is a, c, g, or t
  misc_feature (43)..(44): n is a, c, g, or t
  misc_feature (53)..(54): n is a, c, g, or t
tttttttaagcagtggtatcaacgcagagtacnnaggtaaggnntatcgaggnntttttttttttttttttttttttttttttt

SEQ ID NO: 578 - DNA, 84 bp, Artificial
  Barcode component
  misc_feature (33)..(34): n is a, c, g, or t
  misc_feature (43)..(44): n is a, c, g, or t
  misc_feature (53)..(54): n is a, c, g, or t
tttttttaagcagtggtatcaacgcagagtacnnaggtaaggnncatagcctnntttttttttttttttttttttttttttttt

SEQ ID NO: 579 - DNA, 84 bp, Artificial
  Barcode component
  misc_feature (33)..(34): n is a, c, g, or t
  misc_feature (43)..(44): n is a, c, g, or t
  misc_feature (53)..(54): n is a, c, g, or t
tttttttaagcagtggtatcaacgcagagtacnnaggtaaggnnatcgagacnntttttttttttttttttttttttttttttt

SEQ ID NO: 580 - DNA, 84 bp, Artificial
  Barcode component
  misc_feature (33)..(34): n is a, c, g, or t
  misc_feature (43)..(44): n is a, c, g, or t
  misc_feature (53)..(54): n is a, c, g, or t
tttttttaagcagtggtatcaacgcagagtacnnaggtaaggnnggaagagtnntttttttttttttttttttttttttttttt

SEQ ID NO: 581 - DNA, 84 bp, Artificial
  Barcode component
  misc_feature (33)..(34): n is a, c, g, or t
  misc_feature (43)..(44): n is a, c, g, or t
  misc_feature (53)..(54): n is a, c, g, or t
tttttttaagcagtggtatcaacgcagagtacnnaggtaaggnnccaagtagnntttttttttttttttttttttttttttttt

SEQ ID NO: 582 - DNA, 84 bp, Artificial
  Barcode component
  misc_feature (33)..(34): n is a, c, g, or t
  misc_feature (43)..(44): n is a, c, g, or t
  misc_feature (53)..(54): n is a, c, g, or t
tttttttaagcagtggtatcaacgcagagtacnnaggtaaggnnctgaacagnntttttttttttttttttttttttttttttt

SEQ ID NO: 583 - DNA, 84 bp, Artificial
  Barcode component
  misc_feature (33)..(34): n is a, c, g, or t
  misc_feature (43)..(44): n is a, c, g, or t
  misc_feature (53)..(54): n is a, c, g, or t
tttttttaagcagtggtatcaacgcagagtacnnaggtaaggnngtaggttcnntttttttttttttttttttttttttttttt

SEQ ID NO: 584 - DNA, 84 bp, Artificial
  Barcode component
  misc_feature (33)..(34): n is a, c, g, or t
  misc_feature (43)..(44): n is a, c, g, or t
  misc_feature (53)..(54): n is a, c, g, or t
tttttttaagcagtggtatcaacgcagagtacnnaggtaaggnngtatggacnntttttttttttttttttttttttttttttt

SEQ ID NO: 585 - DNA, 84 bp, Artificial
  Barcode component
  misc_feature (33)..(34): n is a, c, g, or t
  misc_feature (43)..(44): n is a, c, g, or t
  misc_feature (53)..(54): n is a, c, g, or t
tttttttaagcagtggtatcaacgcagagtacnnaggtaaggnntcgcaacanntttttttttttttttttttttttttttttt

SEQ ID NO: 586 - DNA, 84 bp, Artificial
  Barcode component
  misc_feature (33)..(34): n is a, c, g, or t
  misc_feature (43)..(44): n is a, c, g, or t
  misc_feature (53)..(54): n is a, c, g, or t
tttttttaagcagtggtatcaacgcagagtacnnaggtaaggnnccgctaatnntttttttttttttttttttttttttttttt

SEQ ID NO: 587 - DNA, 84 bp, Artificial
  Barcode component
  misc_feature (33)..(34): n is a, c, g, or t
  misc_feature (43)..(44): n is a, c, g, or t
  misc_feature (53)..(54): n is a, c, g, or t
tttttttaagcagtggtatcaacgcagagtacnnaggtaaggnngattcgcanntttttttttttttttttttttttttttttt

SEQ ID NO: 588 - DNA, 84 bp, Artificial
  Barcode component
  misc_feature (33)..(34): n is a, c, g, or t
  misc_feature (43)..(44): n is a, c, g, or t
  misc_feature (53)..(54): n is a, c, g, or t
tttttttaagcagtggtatcaacgcagagtacnnaggtaaggnncgatggaanntttttttttttttttttttttttttttttt

SEQ ID NO: 589 - DNA, 84 bp, Artificial
  Barcode component
  misc_feature (33)..(34): n is a, c, g, or t
  misc_feature (43)..(44): n is a, c, g, or t
  misc_feature (53)..(54): n is a, c, g, or t
tttttttaagcagtggtatcaacgcagagtacnnaggtaaggnnagcaagganntttttttttttttttttttttttttttttt

SEQ ID NO: 590 - DNA, 84 bp, Artificial
  Barcode component
  misc_feature (33)..(34): n is a, c, g, or t
  misc_feature (43)..(44): n is a, c, g, or t
  misc_feature (53)..(54): n is a, c, g, or t
tttttttaagcagtggtatcaacgcagagtacnnaggtaaggnncgtagcaanntttttttttttttttttttttttttttttt

SEQ ID NO: 591 - DNA, 84 bp, Artificial
  Barcode component
  misc_feature (33)..(34): n is a, c, g, or t
  misc_feature (43)..(44): n is a, c, g, or t
  misc_feature (53)..(54): n is a, c, g, or t
tttttttaagcagtggtatcaacgcagagtacnnaggtaaggnntggcagtanntttttttttttttttttttttttttttttt

SEQ ID NO: 592 - DNA, 84 bp, Artificial
  Barcode component
  misc_feature (33)..(34): n is a, c, g, or t
  misc_feature (43)..(44): n is a, c, g, or t
  misc_feature (53)..(54): n is a, c, g, or t
tttttttaagcagtggtatcaacgcagagtacnnaggtaaggnncggtagttnntttttttttttttttttttttttttttttt

SEQ ID NO: 593 - DNA, 84 bp, Artificial
  Barcode component
  misc_feature (33)..(34): n is a, c, g, or t
  misc_feature (43)..(44): n is a, c, g, or t
  misc_feature (53)..(54): n is a, c, g, or t
tttttttaagcagtggtatcaacgcagagtacnnaggtaaggnntgacttcgnntttttttttttttttttttttttttttttt

SEQ ID NO: 594 - DNA, 84 bp, Artificial
  Barcode component
  misc_feature (33)..(34): n is a, c, g, or t
  misc_feature (43)..(44): n is a, c, g, or t
  misc_feature (53)..(54): n is a, c, g, or t
tttttttaagcagtggtatcaacgcagagtacnnaggtaaggnngagtgcaanntttttttttttttttttttttttttttttt

SEQ ID NO: 595 - DNA, 84 bp, Artificial
  Barcode component
  misc_feature (33)..(34): n is a, c, g, or t
  misc_feature (43)..(44): n is a, c, g, or t
  misc_feature (53)..(54): n is a, c, g, or t
tttttttaagcagtggtatcaacgcagagtacnnaggtaaggnnacggtaacnntttttttttttttttttttttttttttttt

SEQ ID NO: 596 - DNA, 84 bp, Artificial
  Barcode component
  misc_feature (33)..(34): n is a, c, g, or t
  misc_feature (43)..(44): n is a, c, g, or t
  misc_feature (53)..(54): n is a, c, g, or t
tttttttaagcagtggtatcaacgcagagtacnnaggtaaggnnaagtggtgnntttttttttttttttttttttttttttttt

SEQ ID NO: 597 - DNA, 84 bp, Artificial
  Barcode component
  misc_feature (33)..(34): n is a, c, g, or t
  misc_feature (43)..(44): n is a, c, g, or t
  misc_feature (53)..(54): n is a, c, g, or t
tttttttaagcagtggtatcaacgcagagtacnnaggtaaggnnggagacaanntttttttttttttttttttttttttttttt

SEQ ID NO: 598 - DNA, 84 bp, Artificial
  Barcode component
  misc_feature (33)..(34): n is a, c, g, or t
  misc_feature (43)..(44): n is a, c, g, or t
  misc_feature (53)..(54): n is a, c, g, or t
tttttttaagcagtggtatcaacgcagagtacnnaggtaaggnntcaaggacnntttttttttttttttttttttttttttttt

SEQ ID NO: 599 - DNA, 84 bp, Artificial
  Barcode component
  misc_feature (33)..(34): n is a, c, g, or t
  misc_feature (43)..(44): n is a, c, g, or t
  misc_feature (53)..(54): n is a, c, g, or t
tttttttaagcagtggtatcaacgcagagtacnnaggtaaggnnaagagagcnntttttttttttttttttttttttttttttt

SEQ ID NO: 600 - DNA, 84 bp, Artificial
  Barcode component
  misc_feature (33)..(34): n is a, c, g, or t
  misc_feature (43)..(44): n is a, c, g, or t
  misc_feature (53)..(54): n is a, c, g, or t
tttttttaagcagtggtatcaacgcagagtacnnaggtaaggnncgagagatnntttttttttttttttttttttttttttttt

SEQ ID NO: 601 - DNA, 84 bp, Artificial
  Barcode component
  misc_feature (33)..(34): n is a, c, g, or t
  misc_feature (43)..(44): n is a, c, g, or t
  misc_feature (53)..(54): n is a, c, g, or t
tttttttaagcagtggtatcaacgcagagtacnnaggtaaggnnacagatggnntttttttttttttttttttttttttttttt

SEQ ID NO: 602 - DNA, 84 bp, Artificial
  Barcode component
  misc_feature (33)..(34): n is a, c, g, or t
  misc_feature (43)..(44): n is a, c, g, or t
  misc_feature (53)..(54): n is a, c, g, or t
tttttttaagcagtggtatcaacgcagagtacnnaggtaaggnnaggagtcanntttttttttttttttttttttttttttttt

SEQ ID NO: 603 - DNA, 84 bp, Artificial
  Barcode component
  misc_feature (33)..(34): n is a, c, g, or t
  misc_feature (43)..(44): n is a, c, g, or t
  misc_feature (53)..(54): n is a, c, g, or t
tttttttaagcagtggtatcaacgcagagtacnnaggtaaggnncgtgttacnntttttttttttttttttttttttttttttt

SEQ ID NO: 604 - DNA, 84 bp, Artificial
  Barcode component
  misc_feature (33)..(34): n is a, c, g, or t
  misc_feature (43)..(44): n is a, c, g, or t
  misc_feature (53)..(54): n is a, c, g, or t
tttttttaagcagtggtatcaacgcagagtacnnaggtaaggnntagtgtgcnntttttttttttttttttttttttttttttt

SEQ ID NO: 605 - DNA, 84 bp, Artificial
  Barcode component
  misc_feature (33)..(34): n is a, c, g, or t
  misc_feature (43)..(44): n is a, c, g, or t
  misc_feature (53)..(54): n is a, c, g, or t
tttttttaagcagtggtatcaacgcagagtacnnaggtaaggnnctcatgacnntttttttttttttttttttttttttttttt

SEQ ID NO: 606 - DNA, 84 bp, Artificial
  Barcode component
  misc_feature (33)..(34): n is a, c, g, or t
  misc_feature (43)..(44): n is a, c, g, or t
  misc_feature (53)..(54): n is a, c, g, or t
tttttttaagcagtggtatcaacgcagagtacnnaggtaaggnngtatccagnntttttttttttttttttttttttttttttt

SEQ ID NO: 607 - DNA, 84 bp, Artificial
  Barcode component
  misc_feature (33)..(34): n is a, c, g, or t
  misc_feature (43)..(44): n is a, c, g, or t
  misc_feature (53)..(54): n is a, c, g, or t
tttttttaagcagtggtatcaacgcagagtacnnaggtaaggnnacgcctatnntttttttttttttttttttttttttttttt

SEQ ID NO: 608 - DNA, 84 bp, Artificial
  Barcode component
  misc_feature (33)..(34): n is a, c, g, or t
  misc_feature (43)..(44): n is a, c, g, or t
  misc_feature (53)..(54): n is a, c, g, or t
tttttttaagcagtggtatcaacgcagagtacnnaggtaaggnnaacgacctnntttttttttttttttttttttttttttttt

SEQ ID NO: 609 - DNA, 84 bp, Artificial
  Barcode component
  misc_feature (33)..(34): n is a, c, g, or t
  misc_feature (43)..(44): n is a, c, g, or t
  misc_feature (53)..(54): n is a, c, g, or t
tttttttaagcagtggtatcaacgcagagtacnnaggtaaggnnatcaggctnntttttttttttttttttttttttttttttt

SEQ ID NO: 610 - DNA, 84 bp, Artificial
  Barcode component
  misc_feature (33)..(34): n is a, c, g, or t
  misc_feature (43)..(44): n is a, c, g, or t
  misc_feature (53)..(54): n is a, c, g, or t
tttttttaagcagtggtatcaacgcagagtacnnaggtaaggnncaagttcgnntttttttttttttttttttttttttttttt

SEQ ID NO: 611 - DNA, 84 bp, Artificial
  Barcode component
  misc_feature (33)..(34): n is a, c, g, or t
  misc_feature (43)..(44): n is a, c, g, or t
  misc_feature (53)..(54): n is a, c, g, or t
tttttttaagcagtggtatcaacgcagagtacnnaggtaaggnntagccaganntttttttttttttttttttttttttttttt

SEQ ID NO: 612 - DNA, 84 bp, Artificial
  Barcode component
  misc_feature (33)..(34): n is a, c, g, or t
  misc_feature (43)..(44): n is a, c, g, or t
  misc_feature (53)..(54): n is a, c, g, or t
tttttttaagcagtggtatcaacgcagagtacnnaggtaaggnncaatcacgnntttttttttttttttttttttttttttttt

SEQ ID NO: 613 - DNA, 84 bp, Artificial
  Barcode component
  misc_feature (33)..(34): n is a, c, g, or t
  misc_feature (43)..(44): n is a, c, g, or t
  misc_feature (53)..(54): n is a, c, g, or t
tttttttaagcagtggtatcaacgcagagtacnnaggtaaggnngcaacaagnntttttttttttttttttttttttttttttt

SEQ ID NO: 614 - DNA, 84 bp, Artificial
  Barcode component
  misc_feature (33)..(34): n is a, c, g, or t
  misc_feature (43)..(44): n is a, c, g, or t
  misc_feature (53)..(54): n is a, c, g, or t
tttttttaagcagtggtatcaacgcagagtacnnaggtaaggnncacgacaanntttttttttttttttttttttttttttttt

SEQ ID NO: 615 - DNA, 84 bp, Artificial
  Barcode component
  misc_feature (33)..(34): n is a, c, g, or t
  misc_feature (43)..(44): n is a, c, g, or t
  misc_feature (53)..(54): n is a, c, g, or t
tttttttaagcagtggtatcaacgcagagtacnnaggtaaggnntacggaganntttttttttttttttttttttttttttttt

SEQ ID NO: 616 - DNA, 84 bp, Artificial
  Barcode component
  misc_feature (33)..(34): n is a, c, g, or t
  misc_feature (43)..(44): n is a, c, g, or t
  misc_feature (53)..(54): n is a, c, g, or t
tttttttaagcagtggtatcaacgcagagtacnnaggtaaggnncgacaaganntttttttttttttttttttttttttttttt

SEQ ID NO: 617 - DNA, 84 bp, Artificial
  Barcode component
  misc_feature (33)..(34): n is a, c, g, or t
  misc_feature (43)..(44): n is a, c, g, or t
  misc_feature (53)..(54): n is a, c, g, or t
tttttttaagcagtggtatcaacgcagagtacnnaggtaaggnncgaagtganntttttttttttttttttttttttttttttt

SEQ ID NO: 618 - DNA, 84 bp, Artificial
  Barcode component
  misc_feature (33)..(34): n is a, c, g, or t
  misc_feature (43)..(44): n is a, c, g, or t
  misc_feature (53)..(54): n is a, c, g, or t
tttttttaagcagtggtatcaacgcagagtacnnaggtaaggnnagctggtanntttttttttttttttttttttttttttttt

SEQ ID NO: 619 - DNA, 84 bp, Artificial
  Barcode component
  misc_feature (33)..(34): n is a, c, g, or t
  misc_feature (43)..(44): n is a, c, g, or t
  misc_feature (53)..(54): n is a, c, g, or t
tttttttaagcagtggtatcaacgcagagtacnnaggtaaggnnaactaggcnntttttttttttttttttttttttttttttt

SEQ ID NO: 620 - DNA, 84 bp, Artificial
  Barcode component
  misc_feature (33)..(34): n is a, c, g, or t
  misc_feature (43)..(44): n is a, c, g, or t
  misc_feature (53)..(54): n is a, c, g, or t
tttttttaagcagtggtatcaacgcagagtacnnaggtaaggnncagcaagtnntttttttttttttttttttttttttttttt

SEQ ID NO: 621 - DNA, 84 bp, Artificial
  Barcode component
  misc_feature (33)..(34): n is a, c, g, or t
  misc_feature (43)..(44): n is a, c, g, or t
  misc_feature (53)..(54): n is a, c, g, or t
tttttttaagcagtggtatcaacgcagagtacnnaggtaaggnnacgaggtanntttttttttttttttttttttttttttttt

SEQ ID NO: 622 - DNA, 84 bp, Artificial
  Barcode component
  misc_feature (33)..(34): n is a, c, g, or t
  misc_feature (43)..(44): n is a, c, g, or t
  misc_feature (53)..(54): n is a, c, g, or t
tttttttaagcagtggtatcaacgcagagtacnnaggtaaggnncatcttccnntttttttttttttttttttttttttttttt

SEQ ID NO: 623 - DNA, 84 bp, Artificial
  Barcode component
  misc_feature (33)..(34): n is a, c, g, or t
  misc_feature (43)..(44): n is a, c, g, or t
  misc_feature (53)..(54): n is a, c, g, or t
tttttttaagcagtggtatcaacgcagagtacnnaggtaaggnncctgaatcnntttttttttttttttttttttttttttttt

SEQ ID NO: 624 - DNA, 84 bp, Artificial
  Barcode component
  misc_feature (33)..(34): n is a, c, g, or t
  misc_feature (43)..(44): n is a, c, g, or t
  misc_feature (53)..(54): n is a, c, g, or t
tttttttaagcagtggtatcaacgcagagtacnnaggtaaggnntgcagactnntttttttttttttttttttttttttttttt

SEQ ID NO: 625 - DNA, 84 bp, Artificial
  Barcode component
  misc_feature (33)..(34): n is a, c, g, or t
  misc_feature (43)..(44): n is a, c, g, or t
  misc_feature (53)..(54): n is a, c, g, or t
tttttttaagcagtggtatcaacgcagagtacnnaggtaaggnnagatgtggnntttttttttttttttttttttttttttttt

SEQ ID NO: 626 - DNA, 84 bp, Artificial
  Barcode component
  misc_feature (33)..(34): n is a, c, g, or t
  misc_feature (43)..(44): n is a, c, g, or t
  misc_feature (53)..(54): n is a, c, g, or t
tttttttaagcagtggtatcaacgcagagtacnnaggtaaggnnagttcgacnntttttttttttttttttttttttttttttt

SEQ ID NO: 627 - DNA, 84 bp, Artificial
  Barcode component
  misc_feature (33)..(34): n is a, c, g, or t
  misc_feature (43)..(44): n is a, c, g, or t
  misc_feature (53)..(54): n is a, c, g, or t
tttttttaagcagtggtatcaacgcagagtacnnaggtaaggnnacaacctcnntttttttttttttttttttttttttttttt

SEQ ID NO: 628 - DNA, 84 bp, Artificial
  Barcode component
  misc_feature (33)..(34): n is a, c, g, or t
  misc_feature (43)..(44): n is a, c, g, or t
  misc_feature (53)..(54): n is a, c, g, or t
tttttttaagcagtggtatcaacgcagagtacnnaggtaaggnncatggtagnntttttttttttttttttttttttttttttt

SEQ ID NO: 629 - DNA, 84 bp, Artificial
  Barcode component
  misc_feature (33)..(34): n is a, c, g, or t
  misc_feature (43)..(44): n is a, c, g, or t
  misc_feature (53)..(54): n is a, c, g, or t
tttttttaagcagtggtatcaacgcagagtacnnaggtaaggnncgtatctcnntttttttttttttttttttttttttttttt

SEQ ID NO: 630 - DNA, 84 bp, Artificial
  Barcode component
  misc_feature (33)..(34): n is a, c, g, or t
  misc_feature (43)..(44): n is a, c, g, or t
  misc_feature (53)..(54): n is a, c, g, or t
tttttttaagcagtggtatcaacgcagagtacnnaggtaaggnncctagttcnntttttttttttttttttttttttttttttt

SEQ ID NO: 631 - DNA, 84 bp, Artificial
  Barcode component
  misc_feature (33)..(34): n is a, c, g, or t
  misc_feature (43)..(44): n is a, c, g, or t
  misc_feature (53)..(54): n is a, c, g, or t
tttttttaagcagtggtatcaacgcagagtacnnaggtaaggnncaagagtcnntttttttttttttttttttttttttttttt

SEQ ID NO: 632 - DNA, 84 bp, Artificial
  Barcode component
  misc_feature (33)..(34): n is a, c, g, or t
  misc_feature (43)..(44): n is a, c, g, or t
  misc_feature (53)..(54): n is a, c, g, or t
tttttttaagcagtggtatcaacgcagagtacnnggaacttgnnaatcggcanntttttttttttttttttttttttttttttt

SEQ ID NO: 633 - DNA, 84 bp, Artificial
  Barcode component
  misc_feature (33)..(34): n is a, c, g, or t
  misc_feature (43)..(44): n is a, c, g, or t
  misc_feature (53)..(54): n is a, c, g, or t
tttttttaagcagtggtatcaacgcagagtacnnggaacttgnntacggcatnntttttttttttttttttttttttttttttt

SEQ ID NO: 634 - DNA, 84 bp, Artificial
  Barcode component
  misc_feature (33)..(34): n is a, c, g, or t
  misc_feature (43)..(44): n is a, c, g, or t
  misc_feature (53)..(54): n is a, c, g, or t
tttttttaagcagtggtatcaacgcagagtacnnggaacttgnnttggatcgnntttttttttttttttttttttttttttttt

SEQ ID NO: 635 - DNA, 84 bp, Artificial
  Barcode component
  misc_feature (33)..(34): n is a, c, g, or t
  misc_feature (43)..(44): n is a, c, g, or t
  misc_feature (53)..(54): n is a, c, g, or t
tttttttaagcagtggtatcaacgcagagtacnnggaacttgnntggaacganntttttttttttttttttttttttttttttt

SEQ ID NO: 636 - DNA, 84 bp, Artificial
  Barcode component
  misc_feature (33)..(34): n is a, c, g, or t
  misc_feature (43)..(44): n is a, c, g, or t
  misc_feature (53)..(54): n is a, c, g, or t
tttttttaagcagtggtatcaacgcagagtacnnggaacttgnnggcaatcanntttttttttttttttttttttttttttttt

SEQ ID NO: 637 - DNA, 84 bp, Artificial
  Barcode component
  misc_feature (33)..(34): n is a, c, g, or t
  misc_feature (43)..(44): n is a, c, g, or t
  misc_feature (53)..(54): n is a, c, g, or t
tttttttaagcagtggtatcaacgcagagtacnnggaacttgnngaatccganntttttttttttttttttttttttttttttt

SEQ ID NO: 638 - DNA, 84 bp, Artificial
  Barcode component
  misc_feature (33)..(34): n is a, c, g, or t
  misc_feature (43)..(44): n is a, c, g, or t
  misc_feature (53)..(54): n is a, c, g, or t
tttttttaagcagtggtatcaacgcagagtacnnggaacttgnnttacggtgnntttttttttttttttttttttttttttttt

SEQ ID NO: 639 - DNA, 84 bp, Artificial
  Barcode component
  misc_feature (33)..(34): n is a, c, g, or t
  misc_feature (43)..(44): n is a, c, g, or t
  misc_feature (53)..(54): n is a, c, g, or t
tttttttaagcagtggtatcaacgcagagtacnnggaacttgnncatatcggnntttttttttttttttttttttttttttttt

SEQ ID NO: 640 - DNA, 84 bp, Artificial
  Barcode component
  misc_feature (33)..(34): n is a, c, g, or t
  misc_feature (43)..(44): n is a, c, g, or t
  misc_feature (53)..(54): n is a, c, g, or t
tttttttaagcagtggtatcaacgcagagtacnnggaacttgnncttcggtanntttttttttttttttttttttttttttttt

SEQ ID NO: 641 - DNA, 84 bp, Artificial
  Barcode component
  misc_feature (33)..(34): n is a, c, g, or t
  misc_feature (43)..(44): n is a, c, g, or t
  misc_feature (53)..(54): n is a, c, g, or t
tttttttaagcagtggtatcaacgcagagtacnnggaacttgnntcctaacgnntttttttttttttttttttttttttttttt

SEQ ID NO: 642 - DNA, 84 bp, Artificial
  Barcode component
  misc_feature (33)..(34): n is a, c, g, or t
  misc_feature (43)..(44): n is a, c, g, or t
  misc_feature (53)..(54): n is a, c, g, or t
tttttttaagcagtggtatcaacgcagagtacnnggaacttgnngtaagccanntttttttttttttttttttttttttttttt

SEQ ID NO: 643 - DNA, 84 bp, Artificial
  Barcode component
  misc_feature (33)..(34): n is a, c, g, or t
  misc_feature (43)..(44): n is a, c, g, or t
  misc_feature (53)..(54): n is a, c, g, or t
tttttttaagcagtggtatcaacgcagagtacnnggaacttgnntaaggtggnntttttttttttttttttttttttttttttt

SEQ ID NO: 644 - DNA, 84 bp, Artificial
  Barcode component
  misc_feature (33)..(34): n is a, c, g, or t
  misc_feature (43)..(44): n is a, c, g, or t
  misc_feature (53)..(54): n is a, c, g, or t
tttttttaagcagtggtatcaacgcagagtacnnggaacttgnnggtaagctnntttttttttttttttttttttttttttttt

SEQ ID NO: 645 - DNA, 84 bp, Artificial
  Barcode component
  misc_feature (33)..(34): n is a, c, g, or t
  misc_feature (43)..(44): n is a, c, g, or t
  misc_feature (53)..(54): n is a, c, g, or t
tttttttaagcagtggtatcaacgcagagtacnnggaacttgnntgtgtcganntttttttttttttttttttttttttttttt

SEQ ID NO: 646 - DNA, 84 bp, Artificial
  Barcode component
  misc_feature (33)..(34): n is a, c, g, or t
  misc_feature (43)..(44): n is a, c, g, or t
  misc_feature (53)..(54): n is a, c, g, or t
tttttttaagcagtggtatcaacgcagagtacnnggaacttgnngagcatganntttttttttttttttttttttttttttttt

SEQ ID NO: 647 - DNA, 84 bp, Artificial
  Barcode component
  misc_feature (33)..(34): n is a, c, g, or t
  misc_feature (43)..(44): n is a, c, g, or t
  misc_feature (53)..(54): n is a, c, g, or t
tttttttaagcagtggtatcaacgcagagtacnnggaacttgnntcgaagtcnntttttttttttttttttttttttttttttt

SEQ ID NO: 648 - DNA, 84 bp, Artificial
  Barcode component
  misc_feature (33)..(34): n is a, c, g, or t
  misc_feature (43)..(44): n is a, c, g, or t
  misc_feature (53)..(54): n is a, c, g, or t
tttttttaagcagtggtatcaacgcagagtacnnggaacttgnnggtgaacanntttttttttttttttttttttttttttttt

SEQ ID NO: 649 - DNA, 84 bp, Artificial
  Barcode component
  misc_feature (33)..(34): n is a, c, g, or t
  misc_feature (43)..(44): n is a, c, g, or t
  misc_feature (53)..(54): n is a, c, g, or t
tttttttaagcagtggtatcaacgcagagtacnnggaacttgnnacatgcacnntttttttttttttttttttttttttttttt

SEQ ID NO: 650 - DNA, 84 bp, Artificial
  Barcode component
  misc_feature (33)..(34): n is a, c, g, or t
  misc_feature (43)..(44): n is a, c, g, or t
  misc_feature (53)..(54): n is a, c, g, or t
tttttttaagcagtggtatcaacgcagagtacnnggaacttgnnccaacagtnntttttttttttttttttttttttttttttt

SEQ ID NO: 651 - DNA, 84 bp, Artificial
  Barcode component
  misc_feature (33)..(34): n is a, c, g, or t
  misc_feature (43)..(44): n is a, c, g, or t
  misc_feature (53)..(54): n is a, c, g, or t
tttttttaagcagtggtatcaacgcagagtacnnggaacttgnnagaacagcnntttttttttttttttttttttttttttttt

SEQ ID NO: 652 - DNA, 84 bp, Artificial
  Barcode component
  misc_feature (33)..(34): n is a, c, g, or t
  misc_feature (43)..(44): n is a, c, g, or t
  misc_feature (53)..(54): n is a, c, g, or t
tttttttaagcagtggtatcaacgcagagtacnnggaacttgnngaacacgtnntttttttttttttttttttttttttttttt

SEQ ID NO: 653 - DNA, 84 bp, Artificial
  Barcode component
  misc_feature (33)..(34): n is a, c, g, or t
  misc_feature (43)..(44): n is a, c, g, or t
  misc_feature (53)..(54): n is a, c, g, or t
tttttttaagcagtggtatcaacgcagagtacnnggaacttgnnggtcttcanntttttttttttttttttttttttttttttt

SEQ ID NO: 654 - DNA, 84 bp, Artificial
  Barcode component
  misc_feature (33)..(34): n is a, c, g, or t
  misc_feature (43)..(44): n is a, c, g, or t
  misc_feature (53)..(54): n is a, c, g, or t
tttttttaagcagtggtatcaacgcagagtacnnggaacttgnnaggttcagnntttttttttttttttttttttttttttttt

SEQ ID NO: 655 - DNA, 84 bp, Artificial
  Barcode component
  misc_feature (33)..(34): n is a, c, g, or t
  misc_feature (43)..(44): n is a, c, g, or t
  misc_feature (53)..(54): n is a, c, g, or t
tttttttaagcagtggtatcaacgcagagtacnnggaacttgnnctagagcanntttttttttttttttttttttttttttttt

SEQ ID NO: 656 - DNA, 84 bp, Artificial
  Barcode component
  misc_feature (33)..(34): n is a, c, g, or t
  misc_feature (43)..(44): n is a, c, g, or t
  misc_feature (53)..(54): n is a, c, g, or t
tttttttaagcagtggtatcaacgcagagtacnnggaacttgnncttctagcnntttttttttttttttttttttttttttttt

SEQ ID NO: 657 - DNA, 84 bp, Artificial
  Barcode component
  misc_feature (33)..(34): n is a, c, g, or t
  misc_feature (43)..(44): n is a, c, g, or t
  misc_feature (53)..(54): n is a, c, g, or t
tttttttaagcagtggtatcaacgcagagtacnnggaacttgnngagtaacgnntttttttttttttttttttttttttttttt

SEQ ID NO: 658 - DNA, 84 bp, Artificial
  Barcode component
  misc_feature (33)..(34): n is a, c, g, or t
  misc_feature (43)..(44): n is a, c, g, or t
  misc_feature (53)..(54): n is a, c, g, or t
tttttttaagcagtggtatcaacgcagagtacnnggaacttgnnctaagaggnntttttttttttttttttttttttttttttt

SEQ ID NO: 659 - DNA, 84 bp, Artificial
  Barcode component
  misc_feature (33)..(34): n is a, c, g, or t
  misc_feature (43)..(44): n is a, c, g, or t
  misc_feature (53)..(54): n is a, c, g, or t
tttttttaagcagtggtatcaacgcagagtacnnggaacttgnnacgtgtagnntttttttttttttttttttttttttttttt

SEQ ID NO: 660 - DNA, 84 bp, Artificial
  Barcode component
  misc_feature (33)..(34): n is a, c, g, or t
  misc_feature (43)..(44): n is a, c, g, or t
  misc_feature (53)..(54): n is a, c, g, or t
tttttttaagcagtggtatcaacgcagagtacnnggaacttgnnactacaggnntttttttttttttttttttttttttttttt

SEQ ID NO: 661 - DNA, 84 bp, Artificial
  Barcode component
  misc_feature (33)..(34): n is a, c, g, or t
  misc_feature (43)..(44): n is a, c, g, or t
  misc_feature (53)..(54): n is a, c, g, or t
tttttttaagcagtggtatcaacgcagagtacnnggaacttgnntacaggtcnntttttttttttttttttttttttttttttt

SEQ ID NO: 662 - DNA, 84 bp, Artificial
  Barcode component
  misc_feature (33)..(34): n is a, c, g, or t
  misc_feature (43)..(44): n is a, c, g, or t
  misc_feature (53)..(54): n is a, c, g, or t
tttttttaagcagtggtatcaacgcagagtacnnggaacttgnnctcacatgnntttttttttttttttttttttttttttttt

SEQ ID NO: 663 - DNA, 84 bp, Artificial
  Barcode component
  misc_feature (33)..(34): n is a, c, g, or t
  misc_feature (43)..(44): n is a, c, g, or t
  misc_feature (53)..(54): n is a, c, g, or t
tttttttaagcagtggtatcaacgcagagtacnnggaacttgnnactaggagnntttttttttttttttttttttttttttttt

SEQ ID NO: 664 - DNA, 84 bp, Artificial
  Barcode component
  misc_feature (33)..(34): n is a, c, g, or t
  misc_feature (43)..(44): n is a, c, g, or t
  misc_feature (53)..(54): n is a, c, g, or t
tttttttaagcagtggtatcaacgcagagtacnnggaacttgnnccatagganntttttttttttttttttttttttttttttt

SEQ ID NO: 665 - DNA, 84 bp, Artificial
  Barcode component
  misc_feature (33)..(34): n is a, c, g, or t
  misc_feature (43)..(44): n is a, c, g, or t
  misc_feature (53)..(54): n is a, c, g, or t
tttttttaagcagtggtatcaacgcagagtacnnggaacttgnnggagaatcnntttttttttttttttttttttttttttttt

SEQ ID NO: 666 - DNA, 84 bp, Artificial
  Barcode component
  misc_feature (33)..(34): n is a, c, g, or t
  misc_feature (43)..(44): n is a, c, g, or t
  misc_feature (53)..(54): n is a, c, g, or t
tttttttaagcagtggtatcaacgcagagtacnnggaacttgnngccaagaanntttttttttttttttttttttttttttttt

SEQ ID NO: 667 - DNA, 84 bp, Artificial
  Barcode component
  misc_feature (33)..(34): n is a, c, g, or t
  misc_feature (43)..(44): n is a, c, g, or t
  misc_feature (53)..(54): n is a, c, g, or t
tttttttaagcagtggtatcaacgcagagtacnnggaacttgnnaaggcaagnntttttttttttttttttttttttttttttt

SEQ ID NO: 668 - DNA, 84 bp, Artificial
  Barcode component
  misc_feature (33)..(34): n is a, c, g, or t
  misc_feature (43)..(44): n is a, c, g, or t
  misc_feature (53)..(54): n is a, c, g, or t
tttttttaagcagtggtatcaacgcagagtacnnggaacttgnnaatgtcgcnntttttttttttttttttttttttttttttt

SEQ ID NO: 669 - DNA, 84 bp, Artificial
  Barcode component
  misc_feature (33)..(34): n is a, c, g, or t
  misc_feature (43)..(44): n is a, c, g, or t
  misc_feature (53)..(54): n is a, c, g, or t
tttttttaagcagtggtatcaacgcagagtacnnggaacttgnnatggaaccnntttttttttttttttttttttttttttttt

SEQ ID NO: 670 - DNA, 84 bp, Artificial
  Barcode component
  misc_feature (33)..(34): n is a, c, g, or t
  misc_feature (43)..(44): n is a, c, g, or t
  misc_feature (53)..(54): n is a, c, g, or t
tttttttaagcagtggtatcaacgcagagtacnnggaacttgnnagaggcatnntttttttttttttttttttttttttttttt

SEQ ID NO: 671 - DNA, 84 bp, Artificial
  Barcode component
  misc_feature (33)..(34): n is a, c, g, or t
  misc_feature (43)..(44): n is a, c, g, or t
  misc_feature (53)..(54): n is a, c, g, or t
tttttttaagcagtggtatcaacgcagagtacnnggaacttgnntgcatagcnntttttttttttttttttttttttttttttt

SEQ ID NO: 672 - DNA, 84 bp, Artificial
  Barcode component
  misc_feature (33)..(34): n is a, c, g, or t
  misc_feature (43)..(44): n is a, c, g, or t
  misc_feature (53)..(54): n is a, c, g, or t
tttttttaagcagtggtatcaacgcagagtacnnggaacttgnnctaacgganntttttttttttttttttttttttttttttt

SEQ ID NO: 673 - DNA, 84 bp, Artificial
  Barcode component
  misc_feature (33)..(34): n is a, c, g, or t
  misc_feature (43)..(44): n is a, c, g, or t
  misc_feature (53)..(54): n is a, c, g, or t
tttttttaagcagtggtatcaacgcagagtacnnggaacttgnntatcgaggnntttttttttttttttttttttttttttttt

SEQ ID NO: 674 - DNA, 84 bp, Artificial
  Barcode component
  misc_feature (33)..(34): n is a, c, g, or t
  misc_feature (43)..(44): n is a, c, g, or t
  misc_feature (53)..(54): n is a, c, g, or t
tttttttaagcagtggtatcaacgcagagtacnnggaacttgnncatagcctnntttttttttttttttttttttttttttttt

SEQ ID NO: 675 - DNA, 84 bp, Artificial
  Barcode component
  misc_feature (33)..(34): n is a, c, g, or t
  misc_feature (43)..(44): n is a, c, g, or t
  misc_feature (53)..(54): n is a, c, g, or t
tttttttaagcagtggtatcaacgcagagtacnnggaacttgnnatcgagacnntttttttttttttttttttttttttttttt

SEQ ID NO: 676 - DNA, 84 bp, Artificial
  Barcode component
  misc_feature (33)..(34): n is a, c, g, or t
  misc_feature (43)..(44): n is a, c, g, or t
  misc_feature (53)..(54): n is a, c, g, or t
tttttttaagcagtggtatcaacgcagagtacnnggaacttgnnggaagagtnntttttttttttttttttttttttttttttt

SEQ ID NO: 677 - DNA, 84 bp, Artificial
  Barcode component
  misc_feature (33)..(34): n is a, c, g, or t
  misc_feature (43)..(44): n is a, c, g, or t
  misc_feature (53)..(54): n is a, c, g, or t
tttttttaagcagtggtatcaacgcagagtacnnggaacttgnnccaagtagnntttttttttttttttttttttttttttttt

SEQ ID NO: 678 - DNA, 84 bp, Artificial
  Barcode component
  misc_feature (33)..(34): n is a, c, g, or t
  misc_feature (43)..(44): n is a, c, g, or t
  misc_feature (53)..(54): n is a, c, g, or t
tttttttaagcagtggtatcaacgcagagtacnnggaacttgnnctgaacagnntttttttttttttttttttttttttttttt

SEQ ID NO: 679 - DNA, 84 bp, Artificial
  Barcode component
  misc_feature (33)..(34): n is a, c, g, or t
  misc_feature (43)..(44): n is a, c, g, or t
  misc_feature (53)..(54): n is a, c, g, or t
tttttttaagcagtggtatcaacgcagagtacnnggaacttgnngtaggttcnntttttttttttttttttttttttttttttt

SEQ ID NO: 680 - DNA, 84 bp, Artificial
  Barcode component
  misc_feature (33)..(34): n is a, c, g, or t
  misc_feature (43)..(44): n is a, c, g, or t
  misc_feature (53)..(54): n is a, c, g, or t
tttttttaagcagtggtatcaacgcagagtacnnggaacttgnngtatggacnntttttttttttttttttttttttttttttt

SEQ ID NO: 681 - DNA, 84 bp, Artificial
  Barcode component
  misc_feature (33)..(34): n is a, c, g, or t
  misc_feature (43)..(44): n is a, c, g, or t
  misc_feature (53)..(54): n is a, c, g, or t
tttttttaagcagtggtatcaacgcagagtacnnggaacttgnntcgcaacanntttttttttttttttttttttttttttttt

SEQ ID NO: 682 - DNA, 84 bp, Artificial
  Barcode component
  misc_feature (33)..(34): n is a, c, g, or t
  misc_feature (43)..(44): n is a, c, g, or t
  misc_feature (53)..(54): n is a, c, g, or t
tttttttaagcagtggtatcaacgcagagtacnnggaacttgnnccgctaatnntttttttttttttttttttttttttttttt

SEQ ID NO: 683 - DNA, 84 bp, Artificial
  Barcode component
  misc_feature (33)..(34): n is a, c, g, or t
  misc_feature (43)..(44): n is a, c, g, or t
  misc_feature (53)..(54): n is a, c, g, or t
tttttttaagcagtggtatcaacgcagagtacnnggaacttgnngattcgcanntttttttttttttttttttttttttttttt

SEQ ID NO: 684 - DNA, 84 bp, Artificial
  Barcode component
  misc_feature (33)..(34): n is a, c, g, or t
  misc_feature (43)..(44): n is a, c, g, or t
  misc_feature (53)..(54): n is a, c, g, or t
tttttttaagcagtggtatcaacgcagagtacnnggaacttgnncgatggaanntttttttttttttttttttttttttttttt

SEQ ID NO: 685 - DNA, 84 bp, Artificial
  Barcode component
  misc_feature (33)..(34): n is a, c, g, or t
  misc_feature (43)..(44): n is a, c, g, or t
  misc_feature (53)..(54): n is a, c, g, or t
tttttttaagcagtggtatcaacgcagagtacnnggaacttgnnagcaagganntttttttttttttttttttttttttttttt

SEQ ID NO: 686 - DNA, 84 bp, Artificial
  Barcode component
  misc_feature (33)..(34): n is a, c, g, or t
  misc_feature (43)..(44): n is a, c, g, or t
  misc_feature (53)..(54): n is a, c, g, or t
tttttttaagcagtggtatcaacgcagagtacnnggaacttgnncgtagcaanntttttttttttttttttttttttttttttt

SEQ ID NO: 687 - DNA, 84 bp, Artificial
  Barcode component
  misc_feature (33)..(34): n is a, c, g, or t
  misc_feature (43)..(44): n is a, c, g, or t
  misc_feature (53)..(54): n is a, c, g, or t
tttttttaagcagtggtatcaacgcagagtacnnggaacttgnntggcagtanntttttttttttttttttttttttttttttt

SEQ ID NO: 688 - DNA, 84 bp, Artificial
  Barcode component
  misc_feature (33)..(34): n is a, c, g, or t
  misc_feature (43)..(44): n is a, c, g, or t
  misc_feature (53)..(54): n is a, c, g, or t
tttttttaagcagtggtatcaacgcagagtacnnggaacttgnncggtagttnntttttttttttttttttttttttttttttt

SEQ ID NO: 689 - DNA, 84 bp, Artificial
  Barcode component
  misc_feature (33)..(34): n is a, c, g, or t
  misc_feature (43)..(44): n is a, c, g, or t
  misc_feature (53)..(54): n is a, c, g, or t
tttttttaagcagtggtatcaacgcagagtacnnggaacttgnntgacttcgnntttttttttttttttttttttttttttttt

SEQ ID NO: 690 - DNA, 84 bp, Artificial
  Barcode component
  misc_feature (33)..(34): n is a, c, g, or t
  misc_feature (43)..(44): n is a, c, g, or t
  misc_feature (53)..(54): n is a, c, g, or t
tttttttaagcagtggtatcaacgcagagtacnnggaacttgnngagtgcaanntttttttttttttttttttttttttttttt

SEQ ID NO: 691 - DNA, 84 bp, Artificial
  Barcode component
  misc_feature (33)..(34): n is a, c, g, or t
  misc_feature (43)..(44): n is a, c, g, or t
  misc_feature (53)..(54): n is a, c, g, or t
tttttttaagcagtggtatcaacgcagagtacnnggaacttgnnacggtaacnntttttttttttttttttttttttttttttt

SEQ ID NO: 692 - DNA, 84 bp, Artificial
  Barcode component
  misc_feature (33)..(34): n is a, c, g, or t
  misc_feature (43)..(44): n is a, c, g, or t
  misc_feature (53)..(54): n is a, c, g, or t
tttttttaagcagtggtatcaacgcagagtacnnggaacttgnnaagtggtgnntttttttttttttttttttttttttttttt

SEQ ID NO: 693 - DNA, 84 bp, Artificial
  Barcode component
  misc_feature (33)..(34): n is a, c, g, or t
  misc_feature (43)..(44): n is a, c, g, or t
  misc_feature (53)..(54): n is a, c, g, or t
tttttttaagcagtggtatcaacgcagagtacnnggaacttgnnggagacaanntttttttttttttttttttttttttttttt

SEQ ID NO: 694 - DNA, 84 bp, Artificial
  Barcode component
  misc_feature (33)..(34): n is a, c, g, or t
  misc_feature (43)..(44): n is a, c, g, or t
  misc_feature (53)..(54): n is a, c, g, or t
tttttttaagcagtggtatcaacgcagagtacnnggaacttgnntcaaggacnntttttttttttttttttttttttttttttt

SEQ ID NO: 695 - DNA, 84 bp, Artificial
  Barcode component
  misc_feature (33)..(34): n is a, c, g, or t
  misc_feature (43)..(44): n is a, c, g, or t
  misc_feature (53)..(54): n is a, c, g, or t
tttttttaagcagtggtatcaacgcagagtacnnggaacttgnnaagagagcnntttttttttttttttttttttttttttttt

SEQ ID NO: 696 - DNA, 84 bp, Artificial
  Barcode component
  misc_feature (33)..(34): n is a, c, g, or t
  misc_feature (43)..(44): n is a, c, g, or t
  misc_feature (53)..(54): n is a, c, g, or t
tttttttaagcagtggtatcaacgcagagtacnnggaacttgnncgagagatnntttttttttttttttttttttttttttttt

SEQ ID NO: 697 - DNA, 84 bp, Artificial
  Barcode component
  misc_feature (33)..(34): n is a, c, g, or t
  misc_feature (43)..(44): n is a, c, g, or t
  misc_feature (53)..(54): n is a, c, g, or t
tttttttaagcagtggtatcaacgcagagtacnnggaacttgnnacagatggnntttttttttttttttttttttttttttttt

SEQ ID NO: 698 - DNA, 84 bp, Artificial
  Barcode component
  misc_feature (33)..(34): n is a, c, g, or t
  misc_feature (43)..(44): n is a, c, g, or t
  misc_feature (53)..(54): n is a, c, g, or t
tttttttaagcagtggtatcaacgcagagtacnnggaacttgnnaggagtcanntttttttttttttttttttttttttttttt

SEQ ID NO: 699 - DNA, 84 bp, Artificial
  Barcode component
  misc_feature (33)..(34): n is a, c, g, or t
  misc_feature (43)..(44): n is a, c, g, or t
  misc_feature (53)..(54): n is a, c, g, or t
tttttttaagcagtggtatcaacgcagagtacnnggaacttgnncgtgttacnntttttttttttttttttttttttttttttt

SEQ ID NO: 700 - DNA, 84 bp, Artificial
  Barcode component
  misc_feature (33)..(34): n is a, c, g, or t
  misc_feature (43)..(44): n is a, c, g, or t
  misc_feature (53)..(54): n is a, c, g, or t
tttttttaagcagtggtatcaacgcagagtacnnggaacttgnntagtgtgcnntttttttttttttttttttttttttttttt

SEQ ID NO: 701 - DNA, 84 bp, Artificial
  Barcode component
  misc_feature (33)..(34): n is a, c, g, or t
  misc_feature (43)..(44): n is a, c, g, or t
  misc_feature (53)..(54): n is a, c, g, or t
tttttttaagcagtggtatcaacgcagagtacnnggaacttgnnctcatgacnntttttttttttttttttttttttttttttt

SEQ ID NO: 702 - DNA, 84 bp, Artificial
  Barcode component
  misc_feature (33)..(34): n is a, c, g, or t
  misc_feature (43)..(44): n is a, c, g, or t
  misc_feature (53)..(54): n is a, c, g, or t
tttttttaagcagtggtatcaacgcagagtacnnggaacttgnngtatccagnntttttttttttttttttttttttttttttt

SEQ ID NO: 703 - DNA, 84 bp, Artificial
  Barcode component
  misc_feature (33)..(34): n is a, c, g, or t
  misc_feature (43)..(44): n is a, c, g, or t
  misc_feature (53)..(54): n is a, c, g, or t
tttttttaagcagtggtatcaacgcagagtacnnggaacttgnnacgcctatnntttttttttttttttttttttttttttttt

SEQ ID NO: 704 - DNA, 84 bp, Artificial
  Barcode component
  misc_feature (33)..(34): n is a, c, g, or t
  misc_feature (43)..(44): n is a, c, g, or t
  misc_feature (53)..(54): n is a, c, g, or t
tttttttaagcagtggtatcaacgcagagtacnnggaacttgnnaacgacctnntttttttttttttttttttttttttttttt

SEQ ID NO: 705 - DNA, 84 bp, Artificial
  Barcode component
  misc_feature (33)..(34): n is a, c, g, or t
  misc_feature (43)..(44): n is a, c, g, or t
  misc_feature (53)..(54): n is a, c, g, or t
tttttttaagcagtggtatcaacgcagagtacnnggaacttgnnatcaggctnntttttttttttttttttttttttttttttt

SEQ ID NO: 706 - DNA, 84 bp, Artificial
  Barcode component
  misc_feature (33)..(34): n is a, c, g, or t
  misc_feature (43)..(44): n is a, c, g, or t
  misc_feature (53)..(54): n is a, c, g, or t
tttttttaagcagtggtatcaacgcagagtacnnggaacttgnncaagttcgnntttttttttttttttttttttttttttttt

SEQ ID NO: 707 - DNA, 84 bp, Artificial
  Barcode component
  misc_feature (33)..(34): n is a, c, g, or t
  misc_feature (43)..(44): n is a, c, g, or t
  misc_feature (53)..(54): n is a, c, g, or t
tttttttaagcagtggtatcaacgcagagtacnnggaacttgnntagccaganntttttttttttttttttttttttttttttt

SEQ ID NO: 708 - DNA, 84 bp, Artificial
  Barcode component
  misc_feature (33)..(34): n is a, c, g, or t
  misc_feature (43)..(44): n is a, c, g, or t
  misc_feature (53)..(54): n is a, c, g, or t
tttttttaagcagtggtatcaacgcagagtacnnggaacttgnncaatcacgnntttttttttttttttttttttttttttttt

SEQ ID NO: 709 - DNA, 84 bp, Artificial
  Barcode component
  misc_feature (33)..(34): n is a, c, g, or t
  misc_feature (43)..(44): n is a, c, g, or t
  misc_feature (53)..(54): n is a, c, g, or t
tttttttaagcagtggtatcaacgcagagtacnnggaacttgnngcaacaagnntttttttttttttttttttttttttttttt

SEQ ID NO: 710 - DNA, 84 bp, Artificial
  Barcode component
  misc_feature (33)..(34): n is a, c, g, or t
  misc_feature (43)..(44): n is a, c, g, or t
  misc_feature (53)..(54): n is a, c, g, or t
tttttttaagcagtggtatcaacgcagagtacnnggaacttgnncacgacaanntttttttttttttttttttttttttttttt

SEQ ID NO: 711 - DNA, 84 bp, Artificial
  Barcode component
  misc_feature (33)..(34): n is a, c, g, or t
  misc_feature (43)..(44): n is a, c, g, or t
  misc_feature (53)..(54): n is a, c, g, or t
tttttttaagcagtggtatcaacgcagagtacnnggaacttgnntacggaganntttttttttttttttttttttttttttttt

SEQ ID NO: 712 - DNA, 84 bp, Artificial
  Barcode component
  misc_feature (33)..(34): n is a, c, g, or t
  misc_feature (43)..(44): n is a, c, g, or t
  misc_feature (53)..(54): n is a, c, g, or t
tttttttaagcagtggtatcaacgcagagtacnnggaacttgnncgacaaganntttttttttttttttttttttttttttttt

SEQ ID NO: 713 - DNA, 84 bp, Artificial
  Barcode component
  misc_feature (33)..(34): n is a, c, g, or t
  misc_feature (43)..(44): n is a, c, g, or t
  misc_feature (53)..(54): n is a, c, g, or t
tttttttaagcagtggtatcaacgcagagtacnnggaacttgnncgaagtganntttttttttttttttttttttttttttttt

SEQ ID NO: 714 - DNA, 84 bp, Artificial
  Barcode component
  misc_feature (33)..(34): n is a, c, g, or t
  misc_feature (43)..(44): n is a, c, g, or t
  misc_feature (53)..(54): n is a, c, g, or t
tttttttaagcagtggtatcaacgcagagtacnnggaacttgnnagctggtanntttttttttttttttttttttttttttttt

SEQ ID NO: 715 - DNA, 84 bp, Artificial
  Barcode component
  misc_feature (33)..(34): n is a, c, g, or t
  misc_feature (43)..(44): n is a, c, g, or t
  misc_feature (53)..(54): n is a, c, g, or t
tttttttaagcagtggtatcaacgcagagtacnnggaacttgnnaactaggcnntttttttttttttttttttttttttttttt

SEQ ID NO: 716 - DNA, 84 bp, Artificial
  Barcode component
  misc_feature (33)..(34): n is a, c, g, or t
  misc_feature (43)..(44): n is a, c, g, or t
  misc_feature (53)..(54): n is a, c, g, or t
tttttttaagcagtggtatcaacgcagagtacnnggaacttgnncagcaagtnntttttttttttttttttttttttttttttt

SEQ ID NO: 717 - DNA, 84 bp, Artificial
  Barcode component
  misc_feature (33)..(34): n is a, c, g, or t
  misc_feature (43)..(44): n is a, c, g, or t
  misc_feature (53)..(54): n is a, c, g, or t
tttttttaagcagtggtatcaacgcagagtacnnggaacttgnnacgaggtanntttttttttttttttttttttttttttttt

SEQ ID NO: 718 - DNA, 84 bp, Artificial
  Barcode component
  misc_feature (33)..(34): n is a, c, g, or t
  misc_feature (43)..(44): n is a, c, g, or t
  misc_feature (53)..(54): n is a, c, g, or t
tttttttaagcagtggtatcaacgcagagtacnnggaacttgnncatcttccnntttttttttttttttttttttttttttttt

SEQ ID NO: 719 - DNA, 84 bp, Artificial
  Barcode component
  misc_feature (33)..(34): n is a, c, g, or t
  misc_feature (43)..(44): n is a, c, g, or t
  misc_feature (53)..(54): n is a, c, g, or t
tttttttaagcagtggtatcaacgcagagtacnnggaacttgnncctgaatcnntttttttttttttttttttttttttttttt

SEQ ID NO: 720 - DNA, 84 bp, Artificial
  Barcode component
  misc_feature (33)..(34): n is a, c, g, or t
  misc_feature (43)..(44): n is a, c, g, or t
  misc_feature (53)..(54): n is a, c, g, or t
tttttttaagcagtggtatcaacgcagagtacnnggaacttgnntgcagactnntttttttttttttttttttttttttttttt

SEQ ID NO: 721 - DNA, 84 bp, Artificial
  Barcode component
  misc_feature (33)..(34): n is a, c, g, or t
  misc_feature (43)..(44): n is a, c, g, or t
  misc_feature (53)..(54): n is a, c, g, or t
tttttttaagcagtggtatcaacgcagagtacnnggaacttgnnagatgtggnntttttttttttttttttttttttttttttt

SEQ ID NO: 722 - DNA, 84 bp, Artificial
  Barcode component
  misc_feature (33)..(34): n is a, c, g, or t
  misc_feature (43)..(44): n is a, c, g, or t
  misc_feature (53)..(54): n is a, c, g, or t
tttttttaagcagtggtatcaacgcagagtacnnggaacttgnnagttcgacnntttttttttttttttttttttttttttttt

SEQ ID NO: 723 - DNA, 84 bp, Artificial
  Barcode component
  misc_feature (33)..(34): n is a, c, g, or t
  misc_feature (43)..(44): n is a, c, g, or t
  misc_feature (53)..(54): n is a, c, g, or t
tttttttaagcagtggtatcaacgcagagtacnnggaacttgnnacaacctcnntttttttttttttttttttttttttttttt

SEQ ID NO: 724 - DNA, 84 bp, Artificial
  Barcode component
  misc_feature (33)..(34): n is a, c, g, or t
  misc_feature (43)..(44): n is a, c, g, or t
  misc_feature (53)..(54): n is a, c, g, or t
tttttttaagcagtggtatcaacgcagagtacnnggaacttgnncatggtagnntttttttttttttttttttttttttttttt

SEQ ID NO: 725 - DNA, 84 bp, Artificial
  Barcode component
  misc_feature (33)..(34): n is a, c, g, or t
  misc_feature (43)..(44): n is a, c, g, or t
  misc_feature (53)..(54): n is a, c, g, or t
tttttttaagcagtggtatcaacgcagagtacnnggaacttgnncgtatctcnntttttttttttttttttttttttttttttt

SEQ ID NO: 726 - DNA, 84 bp, Artificial
  Barcode component
  misc_feature (33)..(34): n is a, c, g, or t
  misc_feature (43)..(44): n is a, c, g, or t
  misc_feature (53)..(54): n is a, c, g, or t
tttttttaagcagtggtatcaacgcagagtacnnggaacttgnncctagttcnntttttttttttttttttttttttttttttt

SEQ ID NO: 727 - DNA, 84 bp, Artificial
  Barcode component
  misc_feature (33)..(34): n is a, c, g, or t
  misc_feature (43)..(44): n is a, c, g, or t
  misc_feature (53)..(54): n is a, c, g, or t
tttttttaagcagtggtatcaacgcagagtacnnggaacttgnncaagagtcnntttttttttttttttttttttttttttttt

SEQ ID NO: 728 - DNA, 84 bp, Artificial
  Barcode component
  misc_feature (33)..(34): n is a, c, g, or t
  misc_feature (43)..(44): n is a, c, g, or t
  misc_feature (53)..(54): n is a, c, g, or t
tttttttaagcagtggtatcaacgcagagtacnnggttagtgnnaatcggcanntttttttttttttttttttttttttttttt

SEQ ID NO: 729 - DNA, 84 bp, Artificial
  Barcode component
  misc_feature (33)..(34): n is a, c, g, or t
  misc_feature (43)..(44): n is a, c, g, or t
  misc_feature (53)..(54): n is a, c, g, or t
tttttttaagcagtggtatcaacgcagagtacnnggttagtgnntacggcatnntttttttttttttttttttttttttttttt

SEQ ID NO: 730 - DNA, 84 bp, Artificial
  Barcode component
  misc_feature (33)..(34): n is a, c, g, or t
  misc_feature (43)..(44): n is a, c, g, or t
  misc_feature (53)..(54): n is a, c, g, or t
tttttttaagcagtggtatcaacgcagagtacnnggttagtgnnttggatcgnntttttttttttttttttttttttttttttt

SEQ ID NO: 731 - DNA, 84 bp, Artificial
  Barcode component
  misc_feature (33)..(34): n is a, c, g, or t
  misc_feature (43)..(44): n is a, c, g, or t
  misc_feature (53)..(54): n is a, c, g, or t
tttttttaagcagtggtatcaacgcagagtacnnggttagtgnntggaacganntttttttttttttttttttttttttttttt

SEQ ID NO: 732 - DNA, 84 bp, Artificial
  Barcode component
  misc_feature (33)..(34): n is a, c, g, or t
  misc_feature (43)..(44): n is a, c, g, or t
  misc_feature (53)..(54): n is a, c, g, or t
tttttttaagcagtggtatcaacgcagagtacnnggttagtgnnggcaatcanntttttttttttttttttttttttttttttt

SEQ ID NO: 733 - DNA, 84 bp, Artificial
  Barcode component
  misc_feature (33)..(34): n is a, c, g, or t
  misc_feature (43)..(44): n is a, c, g, or t
  misc_feature (53)..(54): n is a, c, g, or t
tttttttaagcagtggtatcaacgcagagtacnnggttagtgnngaatccganntttttttttttttttttttttttttttttt

SEQ ID NO: 734 - DNA, 84 bp, Artificial
  Barcode component
  misc_feature (33)..(34): n is a, c, g, or t
  misc_feature (43)..(44): n is a, c, g, or t
  misc_feature (53)..(54): n is a, c, g, or t
tttttttaagcagtggtatcaacgcagagtacnnggttagtgnnttacggtgnntttttttttttttttttttttttttttttt

SEQ ID NO: 735 - DNA, 84 bp, Artificial
  Barcode component
  misc_feature (33)..(34): n is a, c, g, or t
  misc_feature (43)..(44): n is a, c, g, or t
  misc_feature (53)..(54): n is a, c, g, or t
tttttttaagcagtggtatcaacgcagagtacnnggttagtgnncatatcggnntttttttttttttttttttttttttttttt

SEQ ID NO: 736 - DNA, 84 bp, Artificial
  Barcode component
  misc_feature (33)..(34): n is a, c, g, or t
  misc_feature (43)..(44): n is a, c, g, or t
  misc_feature (53)..(54): n is a, c, g, or t
tttttttaagcagtggtatcaacgcagagtacnnggttagtgnncttcggtanntttttttttttttttttttttttttttttt

SEQ ID NO: 737 - DNA, 84 bp, Artificial
  Barcode component
  misc_feature (33)..(34): n is a, c, g, or t
  misc_feature (43)..(44): n is a, c, g, or t
  misc_feature (53)..(54): n is a, c, g, or t
tttttttaagcagtggtatcaacgcagagtacnnggttagtgnntcctaacgnntttttttttttttttttttttttttttttt

SEQ ID NO: 738 - DNA, 84 bp, Artificial
  Barcode component
  misc_feature (33)..(34): n is a, c, g, or t
  misc_feature (43)..(44): n is a, c, g, or t
  misc_feature (53)..(54): n is a, c, g, or t
tttttttaagcagtggtatcaacgcagagtacnnggttagtgnngtaagccanntttttttttttttttttttttttttttttt

SEQ ID NO: 739 - DNA, 84 bp, Artificial
  Barcode component
  misc_feature (33)..(34): n is a, c, g, or t
  misc_feature (43)..(44): n is a, c, g, or t
  misc_feature (53)..(54): n is a, c, g, or t
tttttttaagcagtggtatcaacgcagagtacnnggttagtgnntaaggtggnntttttttttttttttttttttttttttttt

SEQ ID NO: 740 - DNA, 84 bp, Artificial
  Barcode component
  misc_feature (33)..(34): n is a, c, g, or t
  misc_feature (43)..(44): n is a, c, g, or t
  misc_feature (53)..(54): n is a, c, g, or t
tttttttaagcagtggtatcaacgcagagtacnnggttagtgnnggtaagctnntttttttttttttttttttttttttttttt

SEQ ID NO: 741 - DNA, 84 bp, Artificial
  Barcode component
  misc_feature (33)..(34): n is a, c, g, or t
  misc_feature (43)..(44): n is a, c, g, or t
  misc_feature (53)..(54): n is a, c, g, or t
tttttttaagcagtggtatcaacgcagagtacnnggttagtgnntgtgtcganntttttttttttttttttttttttttttttt

SEQ ID NO: 742 - DNA, 84 bp, Artificial
  Barcode component
  misc_feature (33)..(34): n is a, c, g, or t
  misc_feature (43)..(44): n is a, c, g, or t
  misc_feature (53)..(54): n is a, c, g, or t
tttttttaagcagtggtatcaacgcagagtacnnggttagtgnngagcatganntttttttttttttttttttttttttttttt

SEQ ID NO: 743 - DNA, 84 bp, Artificial
  Barcode component
  misc_feature (33)..(34): n is a, c, g, or t
  misc_feature (43)..(44): n is a, c, g, or t
  misc_feature (53)..(54): n is a, c, g, or t
tttttttaagcagtggtatcaacgcagagtacnnggttagtgnntcgaagtcnntttttttttttttttttttttttttttttt

SEQ ID NO: 744 - DNA, 84 bp, Artificial
  Barcode component
  misc_feature (33)..(34): n is a, c, g, or t
  misc_feature (43)..(44): n is a, c, g, or t
  misc_feature (53)..(54): n is a, c, g, or t
tttttttaagcagtggtatcaacgcagagtacnnggttagtgnnggtgaacanntttttttttttttttttttttttttttttt

SEQ ID NO: 745 - DNA, 84 bp, Artificial
  Barcode component
  misc_feature (33)..(34): n is a, c, g, or t
  misc_feature (43)..(44): n is a, c, g, or t
  misc_feature (53)..(54): n is a, c, g, or t
tttttttaagcagtggtatcaacgcagagtacnnggttagtgnnacatgcacnntttttttttttttttttttttttttttttt

SEQ ID NO: 746 - DNA, 84 bp, Artificial
  Barcode component
  misc_feature (33)..(34): n is a, c, g, or t
  misc_feature (43)..(44): n is a, c, g, or t
  misc_feature (53)..(54): n is a, c, g, or t
tttttttaagcagtggtatcaacgcagagtacnnggttagtgnnccaacagtnntttttttttttttttttttttttttttttt

SEQ ID NO: 747 - DNA, 84 bp, Artificial
  Barcode component
  misc_feature (33)..(34): n is a, c, g, or t
  misc_feature (43)..(44): n is a, c, g, or t
  misc_feature (53)..(54): n is a, c, g, or t
tttttttaagcagtggtatcaacgcagagtacnnggttagtgnnagaacagcnntttttttttttttttttttttttttttttt

SEQ ID NO: 748 - DNA, 84 bp, Artificial
  Barcode component
  misc_feature (33)..(34): n is a, c, g, or t
  misc_feature (43)..(44): n is a, c, g, or t
  misc_feature (53)..(54): n is a, c, g, or t
tttttttaagcagtggtatcaacgcagagtacnnggttagtgnngaacacgtnntttttttttttttttttttttttttttttt

SEQ ID NO: 749 - DNA, 84 bp, Artificial
  Barcode component
  misc_feature (33)..(34): n is a, c, g, or t
  misc_feature (43)..(44): n is a, c, g, or t
  misc_feature (53)..(54): n is a, c, g, or t
tttttttaagcagtggtatcaacgcagagtacnnggttagtgnnggtcttcanntttttttttttttttttttttttttttttt

SEQ ID NO: 750 - DNA, 84 bp, Artificial
  Barcode component
  misc_feature (33)..(34): n is a, c, g, or t
  misc_feature (43)..(44): n is a, c, g, or t
  misc_feature (53)..(54): n is a, c, g, or t
tttttttaagcagtggtatcaacgcagagtacnnggttagtgnnaggttcagnntttttttttttttttttttttttttttttt

SEQ ID NO: 751 - DNA, 84 bp, Artificial
  Barcode component
  misc_feature (33)..(34): n is a, c, g, or t
  misc_feature (43)..(44): n is a, c, g, or t
  misc_feature (53)..(54): n is a, c, g, or t
tttttttaagcagtggtatcaacgcagagtacnnggttagtgnnctagagcanntttttttttttttttttttttttttttttt

SEQ ID NO: 752 - DNA, 84 bp, Artificial
  Barcode component
  misc_feature (33)..(34): n is a, c, g, or t
  misc_feature (43)..(44): n is a, c, g, or t
  misc_feature (53)..(54): n is a, c, g, or t
tttttttaagcagtggtatcaacgcagagtacnnggttagtgnncttctagcnntttttttttttttttttttttttttttttt

SEQ ID NO: 753 - DNA, 84 bp, Artificial
  Barcode component
  misc_feature (33)..(34): n is a, c, g, or t
  misc_feature (43)..(44): n is a, c, g, or t
  misc_feature (53)..(54): n is a, c, g, or t
tttttttaagcagtggtatcaacgcagagtacnnggttagtgnngagtaacgnntttttttttttttttttttttttttttttt

SEQ ID NO: 754 - DNA, 84 bp, Artificial
  Barcode component
  misc_feature (33)..(34): n is a, c, g, or t
  misc_feature (43)..(44): n is a, c, g, or t
  misc_feature (53)..(54): n is a, c, g, or t
tttttttaagcagtggtatcaacgcagagtacnnggttagtgnnctaagaggnntttttttttttttttttttttttttttttt

SEQ ID NO: 755 - DNA, 84 bp, Artificial
  Barcode component
  misc_feature (33)..(34): n is a, c, g, or t
  misc_feature (43)..(44): n is a, c, g, or t
  misc_feature (53)..(54): n is a, c, g, or t
tttttttaagcagtggtatcaacgcagagtacnnggttagtgnnacgtgtagnntttttttttttttttttttttttttttttt

SEQ ID NO: 756 - DNA, 84 bp, Artificial
  Barcode component
  misc_feature (33)..(34): n is a, c, g, or t
  misc_feature (43)..(44): n is a, c, g, or t
  misc_feature (53)..(54): n is a, c, g, or t
tttttttaagcagtggtatcaacgcagagtacnnggttagtgnnactacaggnntttttttttttttttttttttttttttttt

SEQ ID NO: 757 - DNA, 84 bp, Artificial
  Barcode component
  misc_feature (33)..(34): n is a, c, g, or t
  misc_feature (43)..(44): n is a, c, g, or t
  misc_feature (53)..(54): n is a, c, g, or t
tttttttaagcagtggtatcaacgcagagtacnnggttagtgnntacaggtcnntttttttttttttttttttttttttttttt

SEQ ID NO: 758 - DNA, 84 bp, Artificial
  Barcode component
  misc_feature (33)..(34): n is a, c, g, or t
  misc_feature (43)..(44): n is a, c, g, or t
  misc_feature (53)..(54): n is a, c, g, or t
tttttttaagcagtggtatcaacgcagagtacnnggttagtgnnctcacatgnntttttttttttttttttttttttttttttt

SEQ ID NO: 759 - DNA, 84 bp, Artificial
  Barcode component
  misc_feature (33)..(34): n is a, c, g, or t
  misc_feature (43)..(44): n is a, c, g, or t
  misc_feature (53)..(54): n is a, c, g, or t
tttttttaagcagtggtatcaacgcagagtacnnggttagtgnnactaggagnntttttttttttttttttttttttttttttt

SEQ ID NO: 760 - DNA, 84 bp, Artificial
  Barcode component
  misc_feature (33)..(34): n is a, c, g, or t
  misc_feature (43)..(44): n is a, c, g, or t
  misc_feature (53)..(54): n is a, c, g, or t
tttttttaagcagtggtatcaacgcagagtacnnggttagtgnnccatagganntttttttttttttttttttttttttttttt

SEQ ID NO: 761 - DNA, 84 bp, Artificial
  Barcode component
  misc_feature (33)..(34): n is a, c, g, or t
  misc_feature (43)..(44): n is a, c, g, or t
  misc_feature (53)..(54): n is a, c, g, or t
tttttttaagcagtggtatcaacgcagagtacnnggttagtgnnggagaatcnntttttttttttttttttttttttttttttt

SEQ ID NO: 762 - DNA, 84 bp, Artificial
  Barcode component
  misc_feature (33)..(34): n is a, c, g, or t
  misc_feature (43)..(44): n is a, c, g, or t
  misc_feature (53)..(54): n is a, c, g, or t
tttttttaagcagtggtatcaacgcagagtacnnggttagtgnngccaagaanntttttttttttttttttttttttttttttt

SEQ ID NO: 763 - DNA, 84 bp, Artificial
  Barcode component
  misc_feature (33)..(34): n is a, c, g, or t
  misc_feature (43)..(44): n is a, c, g, or t
  misc_feature (53)..(54): n is a, c, g, or t
tttttttaagcagtggtatcaacgcagagtacnnggttagtgnnaaggcaagnntttttttttttttttttttttttttttttt

SEQ ID NO: 764 - DNA, 84 bp, Artificial
  Barcode component
  misc_feature (33)..(34): n is a, c, g, or t
  misc_feature (43)..(44): n is a, c, g, or t
  misc_feature (53)..(54): n is a, c, g, or t
tttttttaagcagtggtatcaacgcagagtacnnggttagtgnnaatgtcgcnntttttttttttttttttttttttttttttt

SEQ ID NO: 765 - DNA, 84 bp, Artificial
  Barcode component
  misc_feature (33)..(34): n is a, c, g, or t
  misc_feature (43)..(44): n is a, c, g, or t
  misc_feature (53)..(54): n is a, c, g, or t
tttttttaagcagtggtatcaacgcagagtacnnggttagtgnnatggaaccnntttttttttttttttttttttttttttttt

SEQ ID NO: 766 - DNA, 84 bp, Artificial
  Barcode component
  misc_feature (33)..(34): n is a, c, g, or t
  misc_feature (43)..(44): n is a, c, g, or t
  misc_feature (53)..(54): n is a, c, g, or t
tttttttaagcagtggtatcaacgcagagtacnnggttagtgnnagaggcatnntttttttttttttttttttttttttttttt

SEQ ID NO: 767 - DNA, 84 bp, Artificial
  Barcode component
  misc_feature (33)..(34): n is a, c, g, or t
  misc_feature (43)..(44): n is a, c, g, or t
  misc_feature (53)..(54): n is a, c, g, or t
tttttttaagcagtggtatcaacgcagagtacnnggttagtgnntgcatagcnntttttttttttttttttttttttttttttt

SEQ ID NO: 768 - DNA, 84 bp, Artificial
  Barcode component
  misc_feature (33)..(34): n is a, c, g, or t
  misc_feature (43)..(44): n is a, c, g, or t
  misc_feature (53)..(54): n is a, c, g, or t
tttttttaagcagtggtatcaacgcagagtacnnggttagtgnnctaacgganntttttttttttttttttttttttttttttt

SEQ ID NO: 769 - DNA, 84 bp, Artificial
  Barcode component
  misc_feature (33)..(34): n is a, c, g, or t
  misc_feature (43)..(44): n is a, c, g, or t
  misc_feature (53)..(54): n is a, c, g, or t
tttttttaagcagtggtatcaacgcagagtacnnggttagtgnntatcgaggnntttttttttttttttttttttttttttttt

SEQ ID NO: 770 - DNA, 84 bp, Artificial
  Barcode component
  misc_feature (33)..(34): n is a, c, g, or t
  misc_feature (43)..(44): n is a, c, g, or t
  misc_feature (53)..(54): n is a, c, g, or t
tttttttaagcagtggtatcaacgcagagtacnnggttagtgnncatagcctnntttttttttttttttttttttttttttttt

SEQ ID NO: 771 - DNA, 84 bp, Artificial
  Barcode component
  misc_feature (33)..(34): n is a, c, g, or t
  misc_feature (43)..(44): n is a, c, g, or t
  misc_feature (53)..(54): n is a, c, g, or t
tttttttaagcagtggtatcaacgcagagtacnnggttagtgnnatcgagacnntttttttttttttttttttttttttttttt

SEQ ID NO: 772 - DNA, 84 bp, Artificial
  Barcode component
  misc_feature (33)..(34): n is a, c, g, or t
  misc_feature (43)..(44): n is a, c, g, or t
  misc_feature (53)..(54): n is a, c, g, or t
tttttttaagcagtggtatcaacgcagagtacnnggttagtgnnggaagagtnntttttttttttttttttttttttttttttt

SEQ ID NO: 773 - DNA, 84 bp, Artificial
  Barcode component
  misc_feature (33)..(34): n is a, c, g, or t
  misc_feature (43)..(44): n is a, c, g, or t
  misc_feature (53)..(54): n is a, c, g, or t
tttttttaagcagtggtatcaacgcagagtacnnggttagtgnnccaagtagnntttttttttttttttttttttttttttttt

SEQ ID NO: 774 - DNA, 84 bp, Artificial
  Barcode component
  misc_feature (33)..(34): n is a, c, g, or t
  misc_feature (43)..(44): n is a, c, g, or t
  misc_feature (53)..(54): n is a, c, g, or t
tttttttaagcagtggtatcaacgcagagtacnnggttagtgnnctgaacagnntttttttttttttttttttttttttttttt

SEQ ID NO: 775 - DNA, 84 bp, Artificial
  Barcode component
  misc_feature (33)..(34): n is a, c, g, or t
  misc_feature (43)..(44): n is a, c, g, or t
  misc_feature (53)..(54): n is a, c, g, or t
tttttttaagcagtggtatcaacgcagagtacnnggttagtgnngtaggttcnntttttttttttttttttttttttttttttt

SEQ ID NO: 776 - DNA, 84 bp, Artificial
  Barcode component
  misc_feature (33)..(34): n is a, c, g, or t
  misc_feature (43)..(44): n is a, c, g, or t
  misc_feature (53)..(54): n is a, c, g, or t
tttttttaagcagtggtatcaacgcagagtacnnggttagtgnngtatggacnntttttttttttttttttttttttttttttt

SEQ ID NO: 777 - DNA, 84 bp, Artificial
  Barcode component
  misc_feature (33)..(34): n is a, c, g, or t
  misc_feature (43)..(44): n is a, c, g, or t
  misc_feature (53)..(54): n is a, c, g, or t
tttttttaagcagtggtatcaacgcagagtacnnggttagtgnntcgcaacanntttttttttttttttttttttttttttttt

SEQ ID NO: 778 - DNA, 84 bp, Artificial
  Barcode component
  misc_feature (33)..(34): n is a, c, g, or t
  misc_feature (43)..(44): n is a, c, g, or t
  misc_feature (53)..(54): n is a, c, g, or t
tttttttaagcagtggtatcaacgcagagtacnnggttagtgnnccgctaatnntttttttttttttttttttttttttttttt

SEQ ID NO: 779 - DNA, 84 bp, Artificial
  Barcode component
  misc_feature (33)..(34): n is a, c, g, or t
  misc_feature (43)..(44): n is a, c, g, or t
  misc_feature (53)..(54): n is a, c, g, or t
tttttttaagcagtggtatcaacgcagagtacnnggttagtgnngattcgcanntttttttttttttttttttttttttttttt

SEQ ID NO: 780 - DNA, 84 bp, Artificial
  Barcode component
  misc_feature (33)..(34): n is a, c, g, or t
  misc_feature (43)..(44): n is a, c, g, or t
  misc_feature (53)..(54): n is a, c, g, or t
tttttttaagcagtggtatcaacgcagagtacnnggttagtgnncgatggaanntttttttttttttttttttttttttttttt

SEQ ID NO: 781 - DNA, 84 bp, Artificial
  Barcode component
  misc_feature (33)..(34): n is a, c, g, or t
  misc_feature (43)..(44): n is a, c, g, or t
  misc_feature (53)..(54): n is a, c, g, or t
tttttttaagcagtggtatcaacgcagagtacnnggttagtgnnagcaagganntttttttttttttttttttttttttttttt

SEQ ID NO: 782 - DNA, 84 bp, Artificial
  Barcode component
  misc_feature (33)..(34): n is a, c, g, or t
  misc_feature (43)..(44): n is a, c, g, or t
  misc_feature (53)..(54): n is a, c, g, or t
tttttttaagcagtggtatcaacgcagagtacnnggttagtgnncgtagcaanntttttttttttttttttttttttttttttt

SEQ ID NO: 783 - DNA, 84 bp, Artificial
  Barcode component
  misc_feature (33)..(34): n is a, c, g, or t
  misc_feature (43)..(44): n is a, c, g, or t
  misc_feature (53)..(54): n is a, c, g, or t
tttttttaagcagtggtatcaacgcagagtacnnggttagtgnntggcagtanntttttttttttttttttttttttttttttt

SEQ ID NO: 784 - DNA, 84 bp, Artificial
  Barcode component
  misc_feature (33)..(34): n is a, c, g, or t
  misc_feature (43)..(44): n is a, c, g, or t
  misc_feature (53)..(54): n is a, c, g, or t
tttttttaagcagtggtatcaacgcagagtacnnggttagtgnncggtagttnntttttttttttttttttttttttttttttt

SEQ ID NO: 785 - DNA, 84 bp, Artificial
  Barcode component
  misc_feature (33)..(34): n is a, c, g, or t
  misc_feature (43)..(44): n is a, c, g, or t
  misc_feature (53)..(54): n is a, c, g, or t
tttttttaagcagtggtatcaacgcagagtacnnggttagtgnntgacttcgnntttttttttttttttttttttttttttttt

SEQ ID NO: 786 - DNA, 84 bp, Artificial
  Barcode component
  misc_feature (33)..(34): n is a, c, g, or t
  misc_feature (43)..(44): n is a, c, g, or t
  misc_feature (53)..(54): n is a, c, g, or t
tttttttaagcagtggtatcaacgcagagtacnnggttagtgnngagtgcaanntttttttttttttttttttttttttttttt

SEQ ID NO: 787 - DNA, 84 bp, Artificial
  Barcode component
  misc_feature (33)..(34): n is a, c, g, or t
  misc_feature (43)..(44): n is a, c, g, or t
  misc_feature (53)..(54): n is a, c, g, or t
tttttttaagcagtggtatcaacgcagagtacnnggttagtgnnacggtaacnntttttttttttttttttttttttttttttt

SEQ ID NO: 788 - DNA, 84 bp, Artificial
  Barcode component
  misc_feature (33)..(34): n is a, c, g, or t
  misc_feature (43)..(44): n is a, c, g, or t
  misc_feature (53)..(54): n is a, c, g, or t
tttttttaagcagtggtatcaacgcagagtacnnggttagtgnnaagtggtgnntttttttttttttttttttttttttttttt

SEQ ID NO: 789 - DNA, 84 bp, Artificial
  Barcode component
  misc_feature (33)..(34): n is a, c, g, or t
  misc_feature (43)..(44): n is a, c, g, or t
  misc_feature (53)..(54): n is a, c, g, or t
tttttttaagcagtggtatcaacgcagagtacnnggttagtgnnggagacaanntttttttttttttttttttttttttttttt

SEQ ID NO: 790 - DNA, 84 bp, Artificial
  Barcode component
  misc_feature (33)..(34): n is a, c, g, or t
  misc_feature (43)..(44): n is a, c, g, or t
  misc_feature (53)..(54): n is a, c, g, or t
tttttttaagcagtggtatcaacgcagagtacnnggttagtgnntcaaggacnntttttttttttttttttttttttttttttt

SEQ ID NO: 791 - DNA, 84 bp, Artificial
  Barcode component
  misc_feature (33)..(34): n is a, c, g, or t
  misc_feature (43)..(44): n is a, c, g, or t
  misc_feature (53)..(54): n is a, c, g, or t
tttttttaagcagtggtatcaacgcagagtacnnggttagtgnnaagagagcnntttttttttttttttttttttttttttttt

SEQ ID NO: 792 - DNA, 84 bp, Artificial
  Barcode component
  misc_feature (33)..(34): n is a, c, g, or t
  misc_feature (43)..(44): n is a, c, g, or t
  misc_feature (53)..(54): n is a, c, g, or t
tttttttaagcagtggtatcaacgcagagtacnnggttagtgnncgagagatnntttttttttttttttttttttttttttttt

SEQ ID NO: 793 - DNA, 84 bp, Artificial
  Barcode component
  misc_feature (33)..(34): n is a, c, g, or t
  misc_feature (43)..(44): n is a, c, g, or t
  misc_feature (53)..(54): n is a, c, g, or t
tttttttaagcagtggtatcaacgcagagtacnnggttagtgnnacagatggnntttttttttttttttttttttttttttttt

SEQ ID NO: 794 - DNA, 84 bp, Artificial
  Barcode component
  misc_feature (33)..(34): n is a, c, g, or t
  misc_feature (43)..(44): n is a, c, g, or t
  misc_feature (53)..(54): n is a, c, g, or t
tttttttaagcagtggtatcaacgcagagtacnnggttagtgnnaggagtcanntttttttttttttttttttttttttttttt

SEQ ID NO: 795 - DNA, 84 bp, Artificial
  Barcode component
  misc_feature (33)..(34): n is a, c, g, or t
  misc_feature (43)..(44): n is a, c, g, or t
  misc_feature (53)..(54): n is a, c, g, or t
tttttttaagcagtggtatcaacgcagagtacnnggttagtgnncgtgttacnntttttttttttttttttttttttttttttt

SEQ ID NO: 796 - DNA, 84 bp, Artificial
  Barcode component
  misc_feature (33)..(34): n is a, c, g, or t
  misc_feature (43)..(44): n is a, c, g, or t
  misc_feature (53)..(54): n is a, c, g, or t
tttttttaagcagtggtatcaacgcagagtacnnggttagtgnntagtgtgcnntttttttttttttttttttttttttttttt

SEQ ID NO: 797 - DNA, 84 bp, Artificial
  Barcode component
  misc_feature (33)..(34): n is a, c, g, or t
  misc_feature (43)..(44): n is a, c, g, or t
  misc_feature (53)..(54): n is a, c, g, or t
tttttttaagcagtggtatcaacgcagagtacnnggttagtgnnctcatgacnntttttttttttttttttttttttttttttt

SEQ ID NO: 798 - DNA, 84 bp, Artificial
  Barcode component
  misc_feature (33)..(34): n is a, c, g, or t
  misc_feature (43)..(44): n is a, c, g, or t
  misc_feature (53)..(54): n is a, c, g, or t
tttttttaagcagtggtatcaacgcagagtacnnggttagtgnngtatccagnntttttttttttttttttttttttttttttt

SEQ ID NO: 799 - DNA, 84 bp, Artificial
  Barcode component
  misc_feature (33)..(34): n is a, c, g, or t
  misc_feature (43)..(44): n is a, c, g, or t
  misc_feature (53)..(54): n is a, c, g, or t
tttttttaagcagtggtatcaacgcagagtacnnggttagtgnnacgcctatnntttttttttttttttttttttttttttttt

SEQ ID NO: 800 - DNA, 84 bp, Artificial
  Barcode component
  misc_feature (33)..(34): n is a, c, g, or t
  misc_feature (43)..(44): n is a, c, g, or t
  misc_feature (53)..(54): n is a, c, g, or t
tttttttaagcagtggtatcaacgcagagtacnnggttagtgnnaacgacctnntttttttttttttttttttttttttttttt

SEQ ID NO: 801 - DNA, 84 bp, Artificial
  Barcode component
  misc_feature (33)..(34): n is a, c, g, or t
  misc_feature (43)..(44): n is a, c, g, or t
  misc_feature (53)..(54): n is a, c, g, or t
tttttttaagcagtggtatcaacgcagagtacnnggttagtgnnatcaggctnntttttttttttttttttttttttttttttt

SEQ ID NO: 802 - DNA, 84 bp, Artificial
  Barcode component
  misc_feature (33)..(34): n is a, c, g, or t
  misc_feature (43)..(44): n is a, c, g, or t
  misc_feature (53)..(54): n is a, c, g, or t
tttttttaagcagtggtatcaacgcagagtacnnggttagtgnncaagttcgnntttttttttttttttttttttttttttttt

SEQ ID NO: 803 - DNA, 84 bp, Artificial
  Barcode component
  misc_feature (33)..(34): n is a, c, g, or t
  misc_feature (43)..(44): n is a, c, g, or t
  misc_feature (53)..(54): n is a, c, g, or t
tttttttaagcagtggtatcaacgcagagtacnnggttagtgnntagccaganntttttttttttttttttttttttttttttt

SEQ ID NO: 804 - DNA, 84 bp, Artificial
  Barcode component
  misc_feature (33)..(34): n is a, c, g, or t
  misc_feature (43)..(44): n is a, c, g, or t
  misc_feature (53)..(54): n is a, c, g, or t
tttttttaagcagtggtatcaacgcagagtacnnggttagtgnncaatcacgnntttttttttttttttttttttttttttttt

SEQ ID NO: 805 - DNA, 84 bp, Artificial
  Barcode component
  misc_feature (33)..(34): n is a, c, g, or t
  misc_feature (43)..(44): n is a, c, g, or t
  misc_feature (53)..(54): n is a, c, g, or t
tttttttaagcagtggtatcaacgcagagtacnnggttagtgnngcaacaagnntttttttttttttttttttttttttttttt

SEQ ID NO: 806 - DNA, 84 bp, Artificial
  Barcode component
  misc_feature (33)..(34): n is a, c, g, or t
  misc_feature (43)..(44): n is a, c, g, or t
  misc_feature (53)..(54): n is a, c, g, or t
tttttttaagcagtggtatcaacgcagagtacnnggttagtgnncacgacaanntttttttttttttttttttttttttttttt

SEQ ID NO: 807 - DNA, 84 bp, Artificial
  Barcode component
  misc_feature (33)..(34): n is a, c, g, or t
  misc_feature (43)..(44): n is a, c, g, or t
  misc_feature (53)..(54): n is a, c, g, or t
tttttttaagcagtggtatcaacgcagagtacnnggttagtgnntacggaganntttttttttttttttttttttttttttttt

SEQ ID NO: 808 - DNA, 84 bp, Artificial
  Barcode component
  misc_feature (33)..(34): n is a, c, g, or t
  misc_feature (43)..(44): n is a, c, g, or t
  misc_feature (53)..(54): n is a, c, g, or t
tttttttaagcagtggtatcaacgcagagtacnnggttagtgnncgacaaganntttttttttttttttttttttttttttttt

SEQ ID NO: 809 - DNA, 84 bp, Artificial
  Barcode component
  misc_feature (33)..(34): n is a, c, g, or t
  misc_feature (43)..(44): n is a, c, g, or t
  misc_feature (53)..(54): n is a, c, g, or t
tttttttaagcagtggtatcaacgcagagtacnnggttagtgnncgaagtganntttttttttttttttttttttttttttttt

SEQ ID NO: 810 - DNA, 84 bp, Artificial
  Barcode component
  misc_feature (33)..(34): n is a, c, g, or t
  misc_feature (43)..(44): n is a, c, g, or t
  misc_feature (53)..(54): n is a, c, g, or t
tttttttaagcagtggtatcaacgcagagtacnnggttagtgnnagctggtanntttttttttttttttttttttttttttttt

SEQ ID NO: 811 - DNA, 84 bp, Artificial
  Barcode component
  misc_feature (33)..(34): n is a, c, g, or t
  misc_feature (43)..(44): n is a, c, g, or t
  misc_feature (53)..(54): n is a, c, g, or t
tttttttaagcagtggtatcaacgcagagtacnnggttagtgnnaactaggcnntttttttttttttttttttttttttttttt

SEQ ID NO: 812 - DNA, 84 bp, Artificial
  Barcode component
  misc_feature (33)..(34): n is a, c, g, or t
  misc_feature (43)..(44): n is a, c, g, or t
  misc_feature (53)..(54): n is a, c, g, or t
tttttttaagcagtggtatcaacgcagagtacnnggttagtgnncagcaagtnntttttttttttttttttttttttttttttt

SEQ ID NO: 813 - DNA, 84 bp, Artificial
  Barcode component
  misc_feature (33)..(34): n is a, c, g, or t
  misc_feature (43)..(44): n is a, c, g, or t
  misc_feature (53)..(54): n is a, c, g, or t
tttttttaagcagtggtatcaacgcagagtacnnggttagtgnnacgaggtanntttttttttttttttttttttttttttttt

SEQ ID NO: 814 - DNA, 84 bp, Artificial
  Barcode component
  misc_feature (33)..(34): n is a, c, g, or t
  misc_feature (43)..(44): n is a, c, g, or t
  misc_feature (53)..(54): n is a, c, g, or t
tttttttaagcagtggtatcaacgcagagtacnnggttagtgnncatcttccnntttttttttttttttttttttttttttttt

SEQ ID NO: 815 - DNA, 84 bp, Artificial
  Barcode component
  misc_feature (33)..(34): n is a, c, g, or t
  misc_feature (43)..(44): n is a, c, g, or t
  misc_feature (53)..(54): n is a, c, g, or t
tttttttaagcagtggtatcaacgcagagtacnnggttagtgnncctgaatcnntttttttttttttttttttttttttttttt

SEQ ID NO: 816 - DNA, 84 bp, Artificial
  Barcode component
  misc_feature (33)..(34): n is a, c, g, or t
  misc_feature (43)..(44): n is a, c, g, or t
  misc_feature (53)..(54): n is a, c, g, or t
tttttttaagcagtggtatcaacgcagagtacnnggttagtgnntgcagactnntttttttttttttttttttttttttttttt

SEQ ID NO: 817 - DNA, 84 bp, Artificial
  Barcode component
  misc_feature (33)..(34): n is a, c, g, or t
  misc_feature (43)..(44): n is a, c, g, or t
  misc_feature (53)..(54): n is a, c, g, or t
tttttttaagcagtggtatcaacgcagagtacnnggttagtgnnagatgtggnntttttttttttttttttttttttttttttt

SEQ ID NO: 818 - DNA, 84 bp, Artificial
  Barcode component
  misc_feature (33)..(34): n is a, c, g, or t
  misc_feature (43)..(44): n is a, c, g, or t
  misc_feature (53)..(54): n is a, c, g, or t
tttttttaagcagtggtatcaacgcagagtacnnggttagtgnnagttcgacnntttttttttttttttttttttttttttttt

SEQ ID NO: 819 - DNA, 84 bp, Artificial
  Barcode component
  misc_feature (33)..(34): n is a, c, g, or t
  misc_feature (43)..(44): n is a, c, g, or t
  misc_feature (53)..(54): n is a, c, g, or t
tttttttaagcagtggtatcaacgcagagtacnnggttagtgnnacaacctcnntttttttttttttttttttttttttttttt

SEQ ID NO: 820 - DNA, 84 bp, Artificial
  Barcode component
  misc_feature (33)..(34): n is a, c, g, or t
  misc_feature (43)..(44): n is a, c, g, or t
  misc_feature (53)..(54): n is a, c, g, or t
tttttttaagcagtggtatcaacgcagagtacnnggttagtgnncatggtagnntttttttttttttttttttttttttttttt

SEQ ID NO: 821 - DNA, 84 bp, Artificial
  Barcode component
  misc_feature (33)..(34): n is a, c, g, or t
  misc_feature (43)..(44): n is a, c, g, or t
  misc_feature (53)..(54): n is a, c, g, or t
tttttttaagcagtggtatcaacgcagagtacnnggttagtgnncgtatctcnntttttttttttttttttttttttttttttt

SEQ ID NO: 822 - DNA, 84 bp, Artificial
  Barcode component
  misc_feature (33)..(34): n is a, c, g, or t
  misc_feature (43)..(44): n is a, c, g, or t
  misc_feature (53)..(54): n is a, c, g, or t
tttttttaagcagtggtatcaacgcagagtacnnggttagtgnncctagttcnntttttttttttttttttttttttttttttt

SEQ ID NO: 823 - DNA, 84 bp, Artificial
  Barcode component
  misc_feature (33)..(34): n is a, c, g, or t
  misc_feature (43)..(44): n is a, c, g, or t
  misc_feature (53)..(54): n is a, c, g, or t
tttttttaagcagtggtatcaacgcagagtacnnggttagtgnncaagagtcnntttttttttttttttttttttttttttttt

SEQ ID NO: 824 - DNA, 84 bp, Artificial
  Barcode component
  misc_feature (33)..(34): n is a, c, g, or t
  misc_feature (43)..(44): n is a, c, g, or t
  misc_feature (53)..(54): n is a, c, g, or t
tttttttaagcagtggtatcaacgcagagtacnnggagttagnnaatcggcanntttttttttttttttttttttttttttttt

SEQ ID NO: 825 - DNA, 84 bp, Artificial
  Barcode component
  misc_feature (33)..(34): n is a, c, g, or t
  misc_feature (43)..(44): n is a, c, g, or t
  misc_feature (53)..(54): n is a, c, g, or t
tttttttaagcagtggtatcaacgcagagtacnnggagttagnntacggcatnntttttttttttttttttttttttttttttt

SEQ ID NO: 826 - DNA, 84 bp, Artificial
  Barcode component
  misc_feature (33)..(34): n is a, c, g, or t
  misc_feature (43)..(44): n is a, c, g, or t
  misc_feature (53)..(54): n is a, c, g, or t
tttttttaagcagtggtatcaacgcagagtacnnggagttagnnttggatcgnntttttttttttttttttttttttttttttt

SEQ ID NO: 827 - DNA, 84 bp, Artificial
  Barcode component
  misc_feature (33)..(34): n is a, c, g, or t
  misc_feature (43)..(44): n is a, c, g, or t
  misc_feature (53)..(54): n is a, c, g, or t
tttttttaagcagtggtatcaacgcagagtacnnggagttagnntggaacganntttttttttttttttttttttttttttttt

SEQ ID NO: 828 - DNA, 84 bp, Artificial
  Barcode component
  misc_feature (33)..(34): n is a, c, g, or t
  misc_feature (43)..(44): n is a, c, g, or t
  misc_feature (53)..(54): n is a, c, g, or t
tttttttaagcagtggtatcaacgcagagtacnnggagttagnnggcaatcanntttttttttttttttttttttttttttttt

SEQ ID NO: 829 - DNA, 84 bp, Artificial
  Barcode component
  misc_feature (33)..(34): n is a, c, g, or t
  misc_feature (43)..(44): n is a, c, g, or t
  misc_feature (53)..(54): n is a, c, g, or t
tttttttaagcagtggtatcaacgcagagtacnnggagttagnngaatccganntttttttttttttttttttttttttttttt

SEQ ID NO: 830 - DNA, 84 bp, Artificial
  Barcode component
  misc_feature (33)..(34): n is a, c, g, or t
  misc_feature (43)..(44): n is a, c, g, or t
  misc_feature (53)..(54): n is a, c, g, or t
tttttttaagcagtggtatcaacgcagagtacnnggagttagnnttacggtgnntttttttttttttttttttttttttttttt

SEQ ID NO: 831 - DNA, 84 bp, Artificial
  Barcode component
  misc_feature (33)..(34): n is a, c, g, or t
  misc_feature (43)..(44): n is a, c, g, or t
  misc_feature (53)..(54): n is a, c, g, or t
tttttttaagcagtggtatcaacgcagagtacnnggagttagnncatatcggnntttttttttttttttttttttttttttttt

SEQ ID NO: 832 - DNA, 84 bp, Artificial
  Barcode component
  misc_feature (33)..(34): n is a, c, g, or t
  misc_feature (43)..(44): n is a, c, g, or t
  misc_feature (53)..(54): n is a, c, g, or t
tttttttaagcagtggtatcaacgcagagtacnnggagttagnncttcggtanntttttttttttttttttttttttttttttt

SEQ ID NO: 833 - DNA, 84 bp, Artificial
  Barcode component
  misc_feature (33)..(34): n is a, c, g, or t
  misc_feature (43)..(44): n is a, c, g, or t
  misc_feature (53)..(54): n is a, c, g, or t
tttttttaagcagtggtatcaacgcagagtacnnggagttagnntcctaacgnntttttttttttttttttttttttttttttt

SEQ ID NO: 834 - DNA, 84 bp, Artificial
  Barcode component
  misc_feature (33)..(34): n is a, c, g, or t
  misc_feature (43)..(44): n is a, c, g, or t
  misc_feature (53)..(54): n is a, c, g, or t
tttttttaagcagtggtatcaacgcagagtacnnggagttagnngtaagccanntttttttttttttttttttttttttttttt

SEQ ID NO: 835 - DNA, 84 bp, Artificial
  Barcode component
  misc_feature (33)..(34): n is a, c, g, or t
  misc_feature (43)..(44): n is a, c, g, or t
  misc_feature (53)..(54): n is a, c, g, or t
tttttttaagcagtggtatcaacgcagagtacnnggagttagnntaaggtggnntttttttttttttttttttttttttttttt

SEQ ID NO: 836 - DNA, 84 bp, Artificial
  Barcode component
  misc_feature (33)..(34): n is a, c, g, or t
  misc_feature (43)..(44): n is a, c, g, or t
  misc_feature (53)..(54): n is a, c, g, or t
tttttttaagcagtggtatcaacgcagagtacnnggagttagnnggtaagctnntttttttttttttttttttttttttttttt

SEQ ID NO: 837 - DNA, 84 bp, Artificial
  Barcode component
  misc_feature (33)..(34): n is a, c, g, or t
  misc_feature (43)..(44): n is a, c, g, or t
  misc_feature (53)..(54): n is a, c, g, or t
tttttttaagcagtggtatcaacgcagagtacnnggagttagnntgtgtcganntttttttttttttttttttttttttttttt

SEQ ID NO: 838 - DNA, 84 bp, Artificial
  Barcode component
  misc_feature (33)..(34): n is a, c, g, or t
  misc_feature (43)..(44): n is a, c, g, or t
  misc_feature (53)..(54): n is a, c, g, or t
tttttttaagcagtggtatcaacgcagagtacnnggagttagnngagcatganntttttttttttttttttttttttttttttt

SEQ ID NO: 839 - DNA, 84 bp, Artificial
  Barcode component
  misc_feature (33)..(34): n is a, c, g, or t
  misc_feature (43)..(44): n is a, c, g, or t
  misc_feature (53)..(54): n is a, c, g, or t
tttttttaagcagtggtatcaacgcagagtacnnggagttagnntcgaagtcnntttttttttttttttttttttttttttttt

SEQ ID NO: 840 - DNA, 84 bp, Artificial
  Barcode component
  misc_feature (33)..(34): n is a, c, g, or t
  misc_feature (43)..(44): n is a, c, g, or t
  misc_feature (53)..(54): n is a, c, g, or t
tttttttaagcagtggtatcaacgcagagtacnnggagttagnnggtgaacanntttttttttttttttttttttttttttttt

SEQ ID NO: 841 - DNA, 84 bp, Artificial
  Barcode component
  misc_feature (33)..(34): n is a, c, g, or t
  misc_feature (43)..(44): n is a, c, g, or t
  misc_feature (53)..(54): n is a, c, g, or t
tttttttaagcagtggtatcaacgcagagtacnnggagttagnnacatgcacnntttttttttttttttttttttttttttttt

SEQ ID NO: 842 - DNA, 84 bp, Artificial
  Barcode component
  misc_feature (33)..(34): n is a, c, g, or t
  misc_feature (43)..(44): n is a, c, g, or t
  misc_feature (53)..(54): n is a, c, g, or t
tttttttaagcagtggtatcaacgcagagtacnnggagttagnnccaacagtnntttttttttttttttttttttttttttttt

SEQ ID NO: 843 - DNA, 84 bp, Artificial
  Barcode component
  misc_feature (33)..(34): n is a, c, g, or t
  misc_feature (43)..(44): n is a, c, g, or t
  misc_feature (53)..(54): n is a, c, g, or t
tttttttaagcagtggtatcaacgcagagtacnnggagttagnnagaacagcnntttttttttttttttttttttttttttttt

SEQ ID NO: 844 - DNA, 84 bp, Artificial
  Barcode component
  misc_feature (33)..(34): n is a, c, g, or t
  misc_feature (43)..(44): n is a, c, g, or t
  misc_feature (53)..(54): n is a, c, g, or t
tttttttaagcagtggtatcaacgcagagtacnnggagttagnngaacacgtnntttttttttttttttttttttttttttttt

SEQ ID NO: 845 - DNA, 84 bp, Artificial
  Barcode component
  misc_feature (33)..(34): n is a, c, g, or t
  misc_feature (43)..(44): n is a, c, g, or t
  misc_feature (53)..(54): n is a, c, g, or t
tttttttaagcagtggtatcaacgcagagtacnnggagttagnnggtcttcanntttttttttttttttttttttttttttttt

SEQ ID NO: 846 - DNA, 84 bp, Artificial
  Barcode component
  misc_feature (33)..(34): n is a, c, g, or t
  misc_feature (43)..(44): n is a, c, g, or t
  misc_feature (53)..(54): n is a, c, g, or t
tttttttaagcagtggtatcaacgcagagtacnnggagttagnnaggttcagnntttttttttttttttttttttttttttttt

SEQ ID NO: 847 - DNA, 84 bp, Artificial
  Barcode component
  misc_feature (33)..(34): n is a, c, g, or t
  misc_feature (43)..(44): n is a, c, g, or t
  misc_feature (53)..(54): n is a, c, g, or t
tttttttaagcagtggtatcaacgcagagtacnnggagttagnnctagagcanntttttttttttttttttttttttttttttt

SEQ ID NO: 848 - DNA, 84 bp, Artificial
  Barcode component
  misc_feature (33)..(34): n is a, c, g, or t
  misc_feature (43)..(44): n is a, c, g, or t
  misc_feature (53)..(54): n is a, c, g, or t
tttttttaagcagtggtatcaacgcagagtacnnggagttagnncttctagcnntttttttttttttttttttttttttttttt

SEQ ID NO: 849 - DNA, 84 bp, Artificial
  Barcode component
  misc_feature (33)..(34): n is a, c, g, or t
  misc_feature (43)..(44): n is a, c, g, or t
  misc_feature (53)..(54): n is a, c, g, or t
tttttttaagcagtggtatcaacgcagagtacnnggagttagnngagtaacgnntttttttttttttttttttttttttttttt

SEQ ID NO: 850 - DNA, 84 bp, Artificial
  Barcode component
  misc_feature (33)..(34): n is a, c, g, or t
  misc_feature (43)..(44): n is a, c, g, or t
  misc_feature (53)..(54): n is a, c, g, or t
tttttttaagcagtggtatcaacgcagagtacnnggagttagnnctaagaggnntttttttttttttttttttttttttttttt

SEQ ID NO: 851 - DNA, 84 bp, Artificial
  Barcode component
  misc_feature (33)..(34): n is a, c, g, or t
  misc_feature (43)..(44): n is a, c, g, or t
  misc_feature (53)..(54): n is a, c, g, or t
tttttttaagcagtggtatcaacgcagagtacnnggagttagnnacgtgtagnntttttttttttttttttttttttttttttt

SEQ ID NO: 852 - DNA, 84 bp, Artificial
  Barcode component
  misc_feature (33)..(34): n is a, c, g, or t
  misc_feature (43)..(44): n is a, c, g, or t
  misc_feature (53)..(54): n is a, c, g, or t
tttttttaagcagtggtatcaacgcagagtacnnggagttagnnactacaggnntttttttttttttttttttttttttttttt

SEQ ID NO: 853 - DNA, 84 bp, Artificial
  Barcode component
  misc_feature (33)..(34): n is a, c, g, or t
  misc_feature (43)..(44): n is a, c, g, or t
  misc_feature (53)..(54): n is a, c, g, or t
tttttttaagcagtggtatcaacgcagagtacnnggagttagnntacaggtcnntttttttttttttttttttttttttttttt

SEQ ID NO: 854 - DNA, 84 bp, Artificial
  Barcode component
  misc_feature (33)..(34): n is a, c, g, or t
  misc_feature (43)..(44): n is a, c, g, or t
  misc_feature (53)..(54): n is a, c, g, or t
tttttttaagcagtggtatcaacgcagagtacnnggagttagnnctcacatgnntttttttttttttttttttttttttttttt

SEQ ID NO: 855 - DNA, 84 bp, Artificial
  Barcode component
  misc_feature (33)..(34): n is a, c, g, or t
  misc_feature (43)..(44): n is a, c, g, or t
  misc_feature (53)..(54): n is a, c, g, or t
tttttttaagcagtggtatcaacgcagagtacnnggagttagnnactaggagnntttttttttttttttttttttttttttttt

SEQ ID NO: 856 - DNA, 84 bp, Artificial
  Barcode component
  misc_feature (33)..(34): n is a, c, g, or t
  misc_feature (43)..(44): n is a, c, g, or t
  misc_feature (53)..(54): n is a, c, g, or t
tttttttaagcagtggtatcaacgcagagtacnnggagttagnnccatagganntttttttttttttttttttttttttttttt

SEQ ID NO: 857 - DNA, 84 bp, Artificial
  Barcode component
  misc_feature (33)..(34): n is a, c, g, or t
  misc_feature (43)..(44): n is a, c, g, or t
  misc_feature (53)..(54): n is a, c, g, or t
tttttttaagcagtggtatcaacgcagagtacnnggagttagnnggagaatcnntttttttttttttttttttttttttttttt

SEQ ID NO: 858 - DNA, 84 bp, Artificial
  Barcode component
  misc_feature (33)..(34): n is a, c, g, or t
  misc_feature (43)..(44): n is a, c, g, or t
  misc_feature (53)..(54): n is a, c, g, or t
tttttttaagcagtggtatcaacgcagagtacnnggagttagnngccaagaanntttttttttttttttttttttttttttttt

SEQ ID NO: 859 - DNA, 84 bp, Artificial
  Barcode component
  misc_feature (33)..(34): n is a, c, g, or t
  misc_feature (43)..(44): n is a, c, g, or t
  misc_feature (53)..(54): n is a, c, g, or t
tttttttaagcagtggtatcaacgcagagtacnnggagttagnnaaggcaagnntttttttttttttttttttttttttttttt

SEQ ID NO: 860 - DNA, 84 bp, Artificial
  Barcode component
  misc_feature (33)..(34): n is a, c, g, or t
  misc_feature (43)..(44): n is a, c, g, or t
  misc_feature (53)..(54): n is a, c, g, or t
tttttttaagcagtggtatcaacgcagagtacnnggagttagnnaatgtcgcnntttttttttttttttttttttttttttttt

SEQ ID NO: 861 - DNA, 84 bp, Artificial
  Barcode component
  misc_feature (33)..(34): n is a, c, g, or t
  misc_feature (43)..(44): n is a, c, g, or t
  misc_feature (53)..(54): n is a, c, g, or t
tttttttaagcagtggtatcaacgcagagtacnnggagttagnnatggaaccnntttttttttttttttttttttttttttttt

SEQ ID NO: 862 - DNA, 84 bp, Artificial
  Barcode component
  misc_feature (33)..(34): n is a, c, g, or t
  misc_feature (43)..(44): n is a, c, g, or t
  misc_feature (53)..(54): n is a, c, g, or t
tttttttaagcagtggtatcaacgcagagtacnnggagttagnnagaggcatnntttttttttttttttttttttttttttttt

SEQ ID NO: 863 - DNA, 84 bp, Artificial
  Barcode component
  misc_feature (33)..(34): n is a, c, g, or t
  misc_feature (43)..(44): n is a, c, g, or t
  misc_feature (53)..(54): n is a, c, g, or t
tttttttaagcagtggtatcaacgcagagtacnnggagttagnntgcatagcnntttttttttttttttttttttttttttttt

SEQ ID NO: 864 - DNA, 84 bp, Artificial
  Barcode component
  misc_feature (33)..(34): n is a, c, g, or t
  misc_feature (43)..(44): n is a, c, g, or t
  misc_feature (53)..(54): n is a, c, g, or t
tttttttaagcagtggtatcaacgcagagtacnnggagttagnnctaacgganntttttttttttttttttttttttttttttt

SEQ ID NO: 865 - DNA, 84 bp, Artificial
  Barcode component
  misc_feature (33)..(34): n is a, c, g, or t
  misc_feature (43)..(44): n is a, c, g, or t
  misc_feature (53)..(54): n is a, c, g, or t
tttttttaagcagtggtatcaacgcagagtacnnggagttagnntatcgaggnntttttttttttttttttttttttttttttt

SEQ ID NO: 866 - DNA, 84 bp, Artificial
  Barcode component
  misc_feature (33)..(34): n is a, c, g, or t
  misc_feature (43)..(44): n is a, c, g, or t
  misc_feature (53)..(54): n is a, c, g, or t
tttttttaagcagtggtatcaacgcagagtacnnggagttagnncatagcctnntttttttttttttttttttttttttttttt

SEQ ID NO: 867 - DNA, 84 bp, Artificial
  Barcode component
  misc_feature (33)..(34): n is a, c, g, or t
  misc_feature (43)..(44): n is a, c, g, or t
  misc_feature (53)..(54): n is a, c, g, or t
tttttttaagcagtggtatcaacgcagagtacnnggagttagnnatcgagacnntttttttttttttttttttttttttttttt

SEQ ID NO: 868 - DNA, 84 bp, Artificial
  Barcode component
  misc_feature (33)..(34): n is a, c, g, or t
  misc_feature (43)..(44): n is a, c, g, or t
  misc_feature (53)..(54): n is a, c, g, or t
tttttttaagcagtggtatcaacgcagagtacnnggagttagnnggaagagtnntttttttttttttttttttttttttttttt

SEQ ID NO: 869 - DNA, 84 bp, Artificial
  Barcode component
  misc_feature (33)..(34): n is a, c, g, or t
  misc_feature (43)..(44): n is a, c, g, or t
  misc_feature (53)..(54): n is a, c, g, or t
tttttttaagcagtggtatcaacgcagagtacnnggagttagnnccaagtagnntttttttttttttttttttttttttttttt

SEQ ID NO: 870 - DNA, 84 bp, Artificial
  Barcode component
  misc_feature (33)..(34): n is a, c, g, or t
  misc_feature (43)..(44): n is a, c, g, or t
  misc_feature (53)..(54): n is a, c, g, or t
tttttttaagcagtggtatcaacgcagagtacnnggagttagnnctgaacagnntttttttttttttttttttttttttttttt

SEQ ID NO: 871 - DNA, 84 bp, Artificial
  Barcode component
  misc_feature (33)..(34): n is a, c, g, or t
  misc_feature (43)..(44): n is a, c, g, or t
  misc_feature (53)..(54): n is a, c, g, or t
tttttttaagcagtggtatcaacgcagagtacnnggagttagnngtaggttcnntttttttttttttttttttttttttttttt

SEQ ID NO: 872 - DNA, 84 bp, Artificial
  Barcode component
  misc_feature (33)..(34): n is a, c, g, or t
  misc_feature (43)..(44): n is a, c, g, or t
  misc_feature (53)..(54): n is a, c, g, or t
tttttttaagcagtggtatcaacgcagagtacnnggagttagnngtatggacnntttttttttttttttttttttttttttttt

SEQ ID NO: 873 - DNA, 84 bp, Artificial
  Barcode component
  misc_feature (33)..(34): n is a, c, g, or t
  misc_feature (43)..(44): n is a, c, g, or t
  misc_feature (53)..(54): n is a, c, g, or t
tttttttaagcagtggtatcaacgcagagtacnnggagttagnntcgcaacanntttttttttttttttttttttttttttttt

SEQ ID NO: 874 - DNA, 84 bp, Artificial
  Barcode component
  misc_feature (33)..(34): n is a, c, g, or t
  misc_feature (43)..(44): n is a, c, g, or t
  misc_feature (53)..(54): n is a, c, g, or t
tttttttaagcagtggtatcaacgcagagtacnnggagttagnnccgctaatnntttttttttttttttttttttttttttttt

SEQ ID NO: 875 - DNA, 84 bp, Artificial
  Barcode component
  misc_feature (33)..(34): n is a, c, g, or t
  misc_feature (43)..(44): n is a, c, g, or t
  misc_feature (53)..(54): n is a, c, g, or t
tttttttaagcagtggtatcaacgcagagtacnnggagttagnngattcgcanntttttttttttttttttttttttttttttt

SEQ ID NO: 876 - DNA, 84 bp, Artificial
  Barcode component
  misc_feature (33)..(34): n is a, c, g, or t
  misc_feature (43)..(44): n is a, c, g, or t
  misc_feature (53)..(54): n is a, c, g, or t
tttttttaagcagtggtatcaacgcagagtacnnggagttagnncgatggaanntttttttttttttttttttttttttttttt

SEQ ID NO: 877 - DNA, 84 bp, Artificial
  Barcode component
  misc_feature (33)..(34): n is a, c, g, or t
  misc_feature (43)..(44): n is a, c, g, or t
  misc_feature (53)..(54): n is a, c, g, or t
tttttttaagcagtggtatcaacgcagagtacnnggagttagnnagcaagganntttttttttttttttttttttttttttttt

SEQ ID NO: 878 - DNA, 84 bp, Artificial
  Barcode component
  misc_feature (33)..(34): n is a, c, g, or t
  misc_feature (43)..(44): n is a, c, g, or t
  misc_feature (53)..(54): n is a, c, g, or t
tttttttaagcagtggtatcaacgcagagtacnnggagttagnncgtagcaanntttttttttttttttttttttttttttttt

SEQ ID NO: 879 - DNA, 84 bp, Artificial
  Barcode component
  misc_feature (33)..(34): n is a, c, g, or t
  misc_feature (43)..(44): n is a, c, g, or t
  misc_feature (53)..(54): n is a, c, g, or t
tttttttaagcagtggtatcaacgcagagtacnnggagttagnntggcagtanntttttttttttttttttttttttttttttt

SEQ ID NO: 880 - DNA, 84 bp, Artificial
  Barcode component
  misc_feature (33)..(34): n is a, c, g, or t
  misc_feature (43)..(44): n is a, c, g, or t
  misc_feature (53)..(54): n is a, c, g, or t
tttttttaagcagtggtatcaacgcagagtacnnggagttagnncggtagttnntttttttttttttttttttttttttttttt

SEQ ID NO: 881 - DNA, 84 bp, Artificial
  Barcode component
  misc_feature (33)..(34): n is a, c, g, or t
  misc_feature (43)..(44): n is a, c, g, or t
  misc_feature (53)..(54): n is a, c, g, or t
tttttttaagcagtggtatcaacgcagagtacnnggagttagnntgacttcgnntttttttttttttttttttttttttttttt

SEQ ID NO: 882 - DNA, 84 bp, Artificial
  Barcode component
  misc_feature (33)..(34): n is a, c, g, or t
  misc_feature (43)..(44): n is a, c, g, or t
  misc_feature (53)..(54): n is a, c, g, or t
tttttttaagcagtggtatcaacgcagagtacnnggagttagnngagtgcaanntttttttttttttttttttttttttttttt

SEQ ID NO: 883 - DNA, 84 bp, Artificial
  Barcode component
  misc_feature (33)..(34): n is a, c, g, or t
  misc_feature (43)..(44): n is a, c, g, or t
  misc_feature (53)..(54): n is a, c, g, or t
tttttttaagcagtggtatcaacgcagagtacnnggagttagnnacggtaacnntttttttttttttttttttttttttttttt

SEQ ID NO: 884 - DNA, 84 bp, Artificial
  Barcode component
  misc_feature (33)..(34): n is a, c, g, or t
  misc_feature (43)..(44): n is a, c, g, or t
  misc_feature (53)..(54): n is a, c, g, or t
tttttttaagcagtggtatcaacgcagagtacnnggagttagnnaagtggtgnntttttttttttttttttttttttttttttt

SEQ ID NO: 885 - DNA, 84 bp, Artificial
  Barcode component
  misc_feature (33)..(34): n is a, c, g, or t
  misc_feature (43)..(44): n is a, c, g, or t
  misc_feature (53)..(54): n is a, c, g, or t
tttttttaagcagtggtatcaacgcagagtacnnggagttagnnggagacaanntttttttttttttttttttttttttttttt

SEQ ID NO: 886 - DNA, 84 bp, Artificial
  Barcode component
  misc_feature (33)..(34): n is a, c, g, or t
  misc_feature (43)..(44): n is a, c, g, or t
  misc_feature (53)..(54): n is a, c, g, or t
tttttttaagcagtggtatcaacgcagagtacnnggagttagnntcaaggacnntttttttttttttttttttttttttttttt

SEQ ID NO: 887 - DNA, 84 bp, Artificial
  Barcode component
  misc_feature (33)..(34): n is a, c, g, or t
  misc_feature (43)..(44): n is a, c, g, or t
  misc_feature (53)..(54): n is a, c, g, or t
tttttttaagcagtggtatcaacgcagagtacnnggagttagnnaagagagcnntttttttttttttttttttttttttttttt

SEQ ID NO: 888 - DNA, 84 bp, Artificial
  Barcode component
  misc_feature (33)..(34): n is a, c, g, or t
  misc_feature (43)..(44): n is a, c, g, or t
  misc_feature (53)..(54): n is a, c, g, or t
tttttttaagcagtggtatcaacgcagagtacnnggagttagnncgagagatnntttttttttttttttttttttttttttttt

SEQ ID NO: 889 - DNA, 84 bp, Artificial
  Barcode component
  misc_feature (33)..(34): n is a, c, g, or t
  misc_feature (43)..(44): n is a, c, g, or t
  misc_feature (53)..(54): n is a, c, g, or t
tttttttaagcagtggtatcaacgcagagtacnnggagttagnnacagatggnntttttttttttttttttttttttttttttt

SEQ ID NO: 890 - DNA, 84 bp, Artificial
  Barcode component
  misc_feature (33)..(34): n is a, c, g, or t
  misc_feature (43)..(44): n is a, c, g, or t
  misc_feature (53)..(54): n is a, c, g, or t
tttttttaagcagtggtatcaacgcagagtacnnggagttagnnaggagtcanntttttttttttttttttttttttttttttt

SEQ ID NO: 891 - DNA, 84 bp, Artificial
  Barcode component
  misc_feature (33)..(34): n is a, c, g, or t
  misc_feature (43)..(44): n is a, c, g, or t
  misc_feature (53)..(54): n is a, c, g, or t
tttttttaagcagtggtatcaacgcagagtacnnggagttagnncgtgttacnntttttttttttttttttttttttttttttt

SEQ ID NO: 892 - DNA, 84 bp, Artificial
  Barcode component
  misc_feature (33)..(34): n is a, c, g, or t
  misc_feature (43)..(44): n is a, c, g, or t
  misc_feature (53)..(54): n is a, c, g, or t
tttttttaagcagtggtatcaacgcagagtacnnggagttagnntagtgtgcnntttttttttttttttttttttttttttttt

SEQ ID NO: 893 - DNA, 84 bp, Artificial
  Barcode component
  misc_feature (33)..(34): n is a, c, g, or t
  misc_feature (43)..(44): n is a, c, g, or t
  misc_feature (53)..(54): n is a, c, g, or t
tttttttaagcagtggtatcaacgcagagtacnnggagttagnnctcatgacnntttttttttttttttttttttttttttttt

SEQ ID NO: 894 - DNA, 84 bp, Artificial
  Barcode component
  misc_feature (33)..(34): n is a, c, g, or t
  misc_feature (43)..(44): n is a, c, g, or t
  misc_feature (53)..(54): n is a, c, g, or t
tttttttaagcagtggtatcaacgcagagtacnnggagttagnngtatccagnntttttttttttttttttttttttttttttt

SEQ ID NO: 895 - DNA, 84 bp, Artificial
  Barcode component
  misc_feature (33)..(34): n is a, c, g, or t
  misc_feature (43)..(44): n is a, c, g, or t
  misc_feature (53)..(54): n is a, c, g, or t
tttttttaagcagtggtatcaacgcagagtacnnggagttagnnacgcctatnntttttttttttttttttttttttttttttt

SEQ ID NO: 896 - DNA, 84 bp, Artificial
  Barcode component
  misc_feature (33)..(34): n is a, c, g, or t
  misc_feature (43)..(44): n is a, c, g, or t
  misc_feature (53)..(54): n is a, c, g, or t
tttttttaagcagtggtatcaacgcagagtacnnggagttagnnaacgacctnntttttttttttttttttttttttttttttt

SEQ ID NO: 897 - DNA, 84 bp, Artificial
  Barcode component
  misc_feature (33)..(34): n is a, c, g, or t
  misc_feature (43)..(44): n is a, c, g, or t
  misc_feature (53)..(54): n is a, c, g, or t
tttttttaagcagtggtatcaacgcagagtacnnggagttagnnatcaggctnntttttttttttttttttttttttttttttt

SEQ ID NO: 898 - DNA, 84 bp, Artificial
  Barcode component
  misc_feature (33)..(34): n is a, c, g, or t
  misc_feature (43)..(44): n is a, c, g, or t
  misc_feature (53)..(54): n is a, c, g, or t
tttttttaagcagtggtatcaacgcagagtacnnggagttagnncaagttcgnntttttttttttttttttttttttttttttt

SEQ ID NO: 899 - DNA, 84 bp, Artificial
  Barcode component
  misc_feature (33)..(34): n is a, c, g, or t
  misc_feature (43)..(44): n is a, c, g, or t
  misc_feature (53)..(54): n is a, c, g, or t
tttttttaagcagtggtatcaacgcagagtacnnggagttagnntagccaganntttttttttttttttttttttttttttttt

SEQ ID NO: 900 - DNA, 84 bp, Artificial
  Barcode component
  misc_feature (33)..(34): n is a, c, g, or t
  misc_feature (43)..(44): n is a, c, g, or t
  misc_feature (53)..(54): n is a, c, g, or t
tttttttaagcagtggtatcaacgcagagtacnnggagttagnncaatcacgnntttttttttttttttttttttttttttttt

SEQ ID NO: 901 - DNA, 84 bp, Artificial
  Barcode component
  misc_feature (33)..(34): n is a, c, g, or t
  misc_feature (43)..(44): n is a, c, g, or t
  misc_feature (53)..(54): n is a, c, g, or t
tttttttaagcagtggtatcaacgcagagtacnnggagttagnngcaacaagnntttttttttttttttttttttttttttttt

SEQ ID NO: 902 - DNA, 84 bp, Artificial
  Barcode component
  misc_feature (33)..(34): n is a, c, g, or t
  misc_feature (43)..(44): n is a, c, g, or t
  misc_feature (53)..(54): n is a, c, g, or t
tttttttaagcagtggtatcaacgcagagtacnnggagttagnncacgacaanntttttttttttttttttttttttttttttt

SEQ ID NO: 903 - DNA, 84 bp, Artificial
  Barcode component
  misc_feature (33)..(34): n is a, c, g, or t
  misc_feature (43)..(44): n is a, c, g, or t
  misc_feature (53)..(54): n is a, c, g, or t
tttttttaagcagtggtatcaacgcagagtacnnggagttagnntacggaganntttttttttttttttttttttttttttttt

SEQ ID NO: 904 - DNA, 84 bp, Artificial
  Barcode component
  misc_feature (33)..(34): n is a, c, g, or t
  misc_feature (43)..(44): n is a, c, g, or t
  misc_feature (53)..(54): n is a, c, g, or t
tttttttaagcagtggtatcaacgcagagtacnnggagttagnncgacaaganntttttttttttttttttttttttttttttt

SEQ ID NO: 905 - DNA, 84 bp, Artificial
  Barcode component
  misc_feature (33)..(34): n is a, c, g, or t
  misc_feature (43)..(44): n is a, c, g, or t
  misc_feature (53)..(54): n is a, c, g, or t
tttttttaagcagtggtatcaacgcagagtacnnggagttagnncgaagtganntttttttttttttttttttttttttttttt

SEQ ID NO: 906 - DNA, 84 bp, Artificial
  Barcode component
  misc_feature (33)..(34): n is a, c, g, or t
  misc_feature (43)..(44): n is a, c, g, or t
  misc_feature (53)..(54): n is a, c, g, or t
tttttttaagcagtggtatcaacgcagagtacnnggagttagnnagctggtanntttttttttttttttttttttttttttttt

SEQ ID NO: 907 - DNA, 84 bp, Artificial
  Barcode component
  misc_feature (33)..(34): n is a, c, g, or t
  misc_feature (43)..(44): n is a, c, g, or t
  misc_feature (53)..(54): n is a, c, g, or t
tttttttaagcagtggtatcaacgcagagtacnnggagttagnnaactaggcnntttttttttttttttttttttttttttttt

SEQ ID NO: 908 - DNA, 84 bp, Artificial
  Barcode component
  misc_feature (33)..(34): n is a, c, g, or t
  misc_feature (43)..(44): n is a, c, g, or t
  misc_feature (53)..(54): n is a, c, g, or t
tttttttaagcagtggtatcaacgcagagtacnnggagttagnncagcaagtnntttttttttttttttttttttttttttttt

SEQ ID NO: 909 - DNA, 84 bp, Artificial
  Barcode component
  misc_feature (33)..(34): n is a, c, g, or t
  misc_feature (43)..(44): n is a, c, g, or t
  misc_feature (53)..(54): n is a, c, g, or t
tttttttaagcagtggtatcaacgcagagtacnnggagttagnnacgaggtanntttttttttttttttttttttttttttttt

SEQ ID NO: 910 - DNA, 84 bp, Artificial
  Barcode component
  misc_feature (33)..(34): n is a, c, g, or t
  misc_feature (43)..(44): n is a, c, g, or t
  misc_feature (53)..(54): n is a, c, g, or t
tttttttaagcagtggtatcaacgcagagtacnnggagttagnncatcttccnntttttttttttttttttttttttttttttt

SEQ ID NO: 911 - DNA, 84 bp, Artificial
  Barcode component
  misc_feature (33)..(34): n is a, c, g, or t
  misc_feature (43)..(44): n is a, c, g, or t
  misc_feature (53)..(54): n is a, c, g, or t
tttttttaagcagtggtatcaacgcagagtacnnggagttagnncctgaatcnntttttttttttttttttttttttttttttt

SEQ ID NO: 912 - DNA, 84 bp, Artificial
  Barcode component
  misc_feature (33)..(34): n is a, c, g, or t
  misc_feature (43)..(44): n is a, c, g, or t
  misc_feature (53)..(54): n is a, c, g, or t
tttttttaagcagtggtatcaacgcagagtacnnggagttagnntgcagactnntttttttttttttttttttttttttttttt

SEQ ID NO: 913 - DNA, 84 bp, Artificial
  Barcode component
  misc_feature (33)..(34): n is a, c, g, or t
  misc_feature (43)..(44): n is a, c, g, or t
  misc_feature (53)..(54): n is a, c, g, or t
tttttttaagcagtggtatcaacgcagagtacnnggagttagnnagatgtggnntttttttttttttttttttttttttttttt

SEQ ID NO: 914 - DNA, 84 bp, Artificial
  Barcode component
  misc_feature (33)..(34): n is a, c, g, or t
  misc_feature (43)..(44): n is a, c, g, or t
  misc_feature (53)..(54): n is a, c, g, or t
tttttttaagcagtggtatcaacgcagagtacnnggagttagnnagttcgacnntttttttttttttttttttttttttttttt

SEQ ID NO: 915 - DNA, 84 bp, Artificial
  Barcode component
  misc_feature (33)..(34): n is a, c, g, or t
  misc_feature (43)..(44): n is a, c, g, or t
  misc_feature (53)..(54): n is a, c, g, or t
tttttttaagcagtggtatcaacgcagagtacnnggagttagnnacaacctcnntttttttttttttttttttttttttttttt

SEQ ID NO: 916 - DNA, 84 bp, Artificial
  Barcode component
  misc_feature (33)..(34): n is a, c, g, or t
  misc_feature (43)..(44): n is a, c, g, or t
  misc_feature (53)..(54): n is a, c, g, or t
tttttttaagcagtggtatcaacgcagagtacnnggagttagnncatggtagnntttttttttttttttttttttttttttttt

SEQ ID NO: 917 - DNA, 84 bp, Artificial
  Barcode component
  misc_feature (33)..(34): n is a, c, g, or t
  misc_feature (43)..(44): n is a, c, g, or t
  misc_feature (53)..(54): n is a, c, g, or t
tttttttaagcagtggtatcaacgcagagtacnnggagttagnncgtatctcnntttttttttttttttttttttttttttttt

SEQ ID NO: 918 - DNA, 84 bp, Artificial
  Barcode component
  misc_feature (33)..(34): n is a, c, g, or t
  misc_feature (43)..(44): n is a, c, g, or t
  misc_feature (53)..(54): n is a, c, g, or t
tttttttaagcagtggtatcaacgcagagtacnnggagttagnncctagttcnntttttttttttttttttttttttttttttt

SEQ ID NO: 919 - DNA, 84 bp, Artificial
  Barcode component
  misc_feature (33)..(34): n is a, c, g, or t
  misc_feature (43)..(44): n is a, c, g, or t
  misc_feature (53)..(54): n is a, c, g, or t
tttttttaagcagtggtatcaacgcagagtacnnggagttagnncaagagtcnntttttttttttttttttttttttttttttt

SEQ ID NO: 920 - DNA, 84 bp, Artificial
  Barcode component
  misc_feature (33)..(34): n is a, c, g, or t
  misc_feature (43)..(44): n is a, c, g, or t
  misc_feature (53)..(54): n is a, c, g, or t
tttttttaagcagtggtatcaacgcagagtacnntgtgtgtgnnaatcggcanntttttttttttttttttttttttttttttt

SEQ ID NO: 921 - DNA, 84 bp, Artificial
  Barcode component
  misc_feature (33)..(34): n is a, c, g, or t
  misc_feature (43)..(44): n is a, c, g, or t
  misc_feature (53)..(54): n is a, c, g, or t
tttttttaagcagtggtatcaacgcagagtacnntgtgtgtgnntacggcatnntttttttttttttttttttttttttttttt

SEQ ID NO: 922 - DNA, 84 bp, Artificial
  Barcode component
  misc_feature (33)..(34): n is a, c, g, or t
  misc_feature (43)..(44): n is a, c, g, or t
  misc_feature (53)..(54): n is a, c, g, or t
tttttttaagcagtggtatcaacgcagagtacnntgtgtgtgnnttggatcgnntttttttttttttttttttttttttttttt

SEQ ID NO: 923 - DNA, 84 bp, Artificial
  Barcode component
  misc_feature (33)..(34): n is a, c, g, or t
  misc_feature (43)..(44): n is a, c, g, or t
  misc_feature (53)..(54): n is a, c, g, or t
tttttttaagcagtggtatcaacgcagagtacnntgtgtgtgnntggaacganntttttttttttttttttttttttttttttt

SEQ ID NO: 924 - DNA, 84 bp, Artificial
  Barcode component
  misc_feature (33)..(34): n is a, c, g, or t
  misc_feature (43)..(44): n is a, c, g, or t
  misc_feature (53)..(54): n is a, c, g, or t
tttttttaagcagtggtatcaacgcagagtacnntgtgtgtgnnggcaatcanntttttttttttttttttttttttttttttt

SEQ ID NO: 925 - DNA, 84 bp, Artificial
  Barcode component
  misc_feature (33)..(34): n is a, c, g, or t
  misc_feature (43)..(44): n is a, c, g, or t
  misc_feature (53)..(54): n is a, c, g, or t
tttttttaagcagtggtatcaacgcagagtacnntgtgtgtgnngaatccganntttttttttttttttttttttttttttttt

SEQ ID NO: 926 - DNA, 84 bp, Artificial
  Barcode component
  misc_feature (33)..(34): n is a, c, g, or t
  misc_feature (43)..(44): n is a, c, g, or t
  misc_feature (53)..(54): n is a, c, g, or t
tttttttaagcagtggtatcaacgcagagtacnntgtgtgtgnnttacggtgnntttttttttttttttttttttttttttttt

SEQ ID NO: 927 - DNA, 84 bp, Artificial
  Barcode component
  misc_feature (33)..(34): n is a, c, g, or t
  misc_feature (43)..(44): n is a, c, g, or t
  misc_feature (53)..(54): n is a, c, g, or t
tttttttaagcagtggtatcaacgcagagtacnntgtgtgtgnncatatcggnntttttttttttttttttttttttttttttt

SEQ ID NO: 928 - DNA, 84 bp, Artificial
  Barcode component
  misc_feature (33)..(34): n is a, c, g, or t
  misc_feature (43)..(44): n is a, c, g, or t
  misc_feature (53)..(54): n is a, c, g, or t
tttttttaagcagtggtatcaacgcagagtacnntgtgtgtgnncttcggtanntttttttttttttttttttttttttttttt

SEQ ID NO: 929 - DNA, 84 bp, Artificial
  Barcode component
  misc_feature (33)..(34): n is a, c, g, or t
  misc_feature (43)..(44): n is a, c, g, or t
  misc_feature (53)..(54): n is a, c, g, or t
tttttttaagcagtggtatcaacgcagagtacnntgtgtgtgnntcctaacgnntttttttttttttttttttttttttttttt

SEQ ID NO: 930 - DNA, 84 bp, Artificial
  Barcode component
  misc_feature (33)..(34): n is a, c, g, or t
  misc_feature (43)..(44): n is a, c, g, or t
  misc_feature (53)..(54): n is a, c, g, or t
tttttttaagcagtggtatcaacgcagagtacnntgtgtgtgnngtaagccanntttttttttttttttttttttttttttttt

SEQ ID NO: 931 - DNA, 84 bp, Artificial
  Barcode component
  misc_feature (33)..(34): n is a, c, g, or t
  misc_feature (43)..(44): n is a, c, g, or t
  misc_feature (53)..(54): n is a, c, g, or t
tttttttaagcagtggtatcaacgcagagtacnntgtgtgtgnntaaggtggnntttttttttttttttttttttttttttttt

SEQ ID NO: 932 - DNA, 84 bp, Artificial
  Barcode component
  misc_feature (33)..(34): n is a, c, g, or t
  misc_feature (43)..(44): n is a, c, g, or t
  misc_feature (53)..(54): n is a, c, g, or t
tttttttaagcagtggtatcaacgcagagtacnntgtgtgtgnnggtaagctnntttttttttttttttttttttttttttttt

SEQ ID NO: 933 - DNA, 84 bp, Artificial
  Barcode component
  misc_feature (33)..(34): n is a, c, g, or t
  misc_feature (43)..(44): n is a, c, g, or t
  misc_feature (53)..(54): n is a, c, g, or t
tttttttaagcagtggtatcaacgcagagtacnntgtgtgtgnntgtgtcganntttttttttttttttttttttttttttttt

SEQ ID NO: 934 - DNA, 84 bp, Artificial
  Barcode component
  misc_feature (33)..(34): n is a, c, g, or t
  misc_feature (43)..(44): n is a, c, g, or t
  misc_feature (53)..(54): n is a, c, g, or t
tttttttaagcagtggtatcaacgcagagtacnntgtgtgtgnngagcatganntttttttttttttttttttttttttttttt

SEQ ID NO: 935 - DNA, 84 bp, Artificial
  Barcode component
  misc_feature (33)..(34): n is a, c, g, or t
  misc_feature (43)..(44): n is a, c, g, or t
  misc_feature (53)..(54): n is a, c, g, or t
tttttttaagcagtggtatcaacgcagagtacnntgtgtgtgnntcgaagtcnntttttttttttttttttttttttttttttt

SEQ ID NO: 936 - DNA, 84 bp, Artificial
  Barcode component
  misc_feature (33)..(34): n is a, c, g, or t
  misc_feature (43)..(44): n is a, c, g, or t
  misc_feature (53)..(54): n is a, c, g, or t
tttttttaagcagtggtatcaacgcagagtacnntgtgtgtgnnggtgaacanntttttttttttttttttttttttttttttt

SEQ ID NO: 937 - DNA, 84 bp, Artificial
  Barcode component
  misc_feature (33)..(34): n is a, c, g, or t
  misc_feature (43)..(44): n is a, c, g, or t
  misc_feature (53)..(54): n is a, c, g, or t
tttttttaagcagtggtatcaacgcagagtacnntgtgtgtgnnacatgcacnntttttttttttttttttttttttttttttt

SEQ ID NO: 938 - DNA, 84 bp, Artificial
  Barcode component
  misc_feature (33)..(34): n is a, c, g, or t
  misc_feature (43)..(44): n is a, c, g, or t
  misc_feature (53)..(54): n is a, c, g, or t
tttttttaagcagtggtatcaacgcagagtacnntgtgtgtgnnccaacagtnntttttttttttttttttttttttttttttt

SEQ ID NO: 939 - DNA, 84 bp, Artificial
  Barcode component
  misc_feature (33)..(34): n is a, c, g, or t
  misc_feature (43)..(44): n is a, c, g, or t
  misc_feature (53)..(54): n is a, c, g, or t
tttttttaagcagtggtatcaacgcagagtacnntgtgtgtgnnagaacagcnntttttttttttttttttttttttttttttt

SEQ ID NO: 940 - DNA, 84 bp, Artificial
  Barcode component
  misc_feature (33)..(34): n is a, c, g, or t
  misc_feature (43)..(44): n is a, c, g, or t
  misc_feature (53)..(54): n is a, c, g, or t
tttttttaagcagtggtatcaacgcagagtacnntgtgtgtgnngaacacgtnntttttttttttttttttttttttttttttt

SEQ ID NO: 941 - DNA, 84 bp, Artificial
  Barcode component
  misc_feature (33)..(34): n is a, c, g, or t
  misc_feature (43)..(44): n is a, c, g, or t
  misc_feature (53)..(54): n is a, c, g, or t
tttttttaagcagtggtatcaacgcagagtacnntgtgtgtgnnggtcttcanntttttttttttttttttttttttttttttt

SEQ ID NO: 942 - DNA, 84 bp, Artificial
  Barcode component
  misc_feature (33)..(34): n is a, c, g, or t
  misc_feature (43)..(44): n is a, c, g, or t
  misc_feature (53)..(54): n is a, c, g, or t
tttttttaagcagtggtatcaacgcagagtacnntgtgtgtgnnaggttcagnntttttttttttttttttttttttttttttt

SEQ ID NO: 943 - DNA, 84 bp, Artificial
  Barcode component
  misc_feature (33)..(34): n is a, c, g, or t
  misc_feature (43)..(44): n is a, c, g, or t
  misc_feature (53)..(54): n is a, c, g, or t
tttttttaagcagtggtatcaacgcagagtacnntgtgtgtgnnctagagcanntttttttttttttttttttttttttttttt

SEQ ID NO: 944 - DNA, 84 bp, Artificial
  Barcode component
  misc_feature (33)..(34): n is a, c, g, or t
  misc_feature (43)..(44): n is a, c, g, or t
  misc_feature (53)..(54): n is a, c, g, or t
tttttttaagcagtggtatcaacgcagagtacnntgtgtgtgnncttctagcnntttttttttttttttttttttttttttttt

SEQ ID NO: 945 - DNA, 84 bp, Artificial
  Barcode component
  misc_feature (33)..(34): n is a, c, g, or t
  misc_feature (43)..(44): n is a, c, g, or t
  misc_feature (53)..(54): n is a, c, g, or t
tttttttaagcagtggtatcaacgcagagtacnntgtgtgtgnngagtaacgnntttttttttttttttttttttttttttttt

SEQ ID NO: 946 - DNA, 84 bp, Artificial
  Barcode component
  misc_feature (33)..(34): n is a, c, g, or t
  misc_feature (43)..(44): n is a, c, g, or t
  misc_feature (53)..(54): n is a, c, g, or t
tttttttaagcagtggtatcaacgcagagtacnntgtgtgtgnnctaagaggnntttttttttttttttttttttttttttttt

SEQ ID NO: 947 - DNA, 84 bp, Artificial
  Barcode component
  misc_feature (33)..(34): n is a, c, g, or t
  misc_feature (43)..(44): n is a, c, g, or t
  misc_feature (53)..(54): n is a, c, g, or t
tttttttaagcagtggtatcaacgcagagtacnntgtgtgtgnnacgtgtagnntttttttttttttttttttttttttttttt

SEQ ID NO: 948 - DNA, 84 bp, Artificial
  Barcode component
  misc_feature (33)..(34): n is a, c, g, or t
  misc_feature (43)..(44): n is a, c, g, or t
  misc_feature (53)..(54): n is a, c, g, or t
tttttttaagcagtggtatcaacgcagagtacnntgtgtgtgnnactacaggnntttttttttttttttttttttttttttttt

SEQ ID NO: 949 - DNA, 84 bp, Artificial
  Barcode component
  misc_feature (33)..(34): n is a, c, g, or t
  misc_feature (43)..(44): n is a, c, g, or t
  misc_feature (53)..(54): n is a, c, g, or t
tttttttaagcagtggtatcaacgcagagtacnntgtgtgtgnntacaggtcnntttttttttttttttttttttttttttttt

SEQ ID NO: 950 - DNA, 84 bp, Artificial
  Barcode component
  misc_feature (33)..(34): n is a, c, g, or t
  misc_feature (43)..(44): n is a, c, g, or t
  misc_feature (53)..(54): n is a, c, g, or t
tttttttaagcagtggtatcaacgcagagtacnntgtgtgtgnnctcacatgnntttttttttttttttttttttttttttttt

SEQ ID NO: 951 - DNA, 84 bp, Artificial
  Barcode component
  misc_feature (33)..(34): n is a, c, g, or t
  misc_feature (43)..(44): n is a, c, g, or t
  misc_feature (53)..(54): n is a, c, g, or t
tttttttaagcagtggtatcaacgcagagtacnntgtgtgtgnnactaggagnntttttttttttttttttttttttttttttt

SEQ ID NO: 952 - DNA, 84 bp, Artificial
  Barcode component
  misc_feature (33)..(34): n is a, c, g, or t
  misc_feature (43)..(44): n is a, c, g, or t
  misc_feature (53)..(54): n is a, c, g, or t
tttttttaagcagtggtatcaacgcagagtacnntgtgtgtgnnccatagganntttttttttttttttttttttttttttttt

SEQ ID NO: 953 - DNA, 84 bp, Artificial
  Barcode component
  misc_feature (33)..(34): n is a, c, g, or t
  misc_feature (43)..(44): n is a, c, g, or t
  misc_feature (53)..(54): n is a, c, g, or t
tttttttaagcagtggtatcaacgcagagtacnntgtgtgtgnnggagaatcnntttttttttttttttttttttttttttttt

SEQ ID NO: 954 - DNA, 84 bp, Artificial
  Barcode component
  misc_feature (33)..(34): n is a, c, g, or t
  misc_feature (43)..(44): n is a, c, g, or t
  misc_feature (53)..(54): n is a, c, g, or t
tttttttaagcagtggtatcaacgcagagtacnntgtgtgtgnngccaagaanntttttttttttttttttttttttttttttt

SEQ ID NO: 955 - DNA, 84 bp, Artificial
  Barcode component
  misc_feature (33)..(34): n is a, c, g, or t
  misc_feature (43)..(44): n is a, c, g, or t
  misc_feature (53)..(54): n is a, c, g, or t
tttttttaagcagtggtatcaacgcagagtacnntgtgtgtgnnaaggcaagnntttttttttttttttttttttttttttttt

SEQ ID NO: 956 - DNA, 84 bp, Artificial
  Barcode component
  misc_feature (33)..(34): n is a, c, g, or t
  misc_feature (43)..(44): n is a, c, g, or t
  misc_feature (53)..(54): n is a, c, g, or t
tttttttaagcagtggtatcaacgcagagtacnntgtgtgtgnnaatgtcgcnntttttttttttttttttttttttttttttt

SEQ ID NO: 957 - DNA, 84 bp, Artificial
  Barcode component
  misc_feature (33)..(34): n is a, c, g, or t
  misc_feature (43)..(44): n is a, c, g, or t
  misc_feature (53)..(54): n is a, c, g, or t
tttttttaagcagtggtatcaacgcagagtacnntgtgtgtgnnatggaaccnntttttttttttttttttttttttttttttt

SEQ ID NO: 958 - DNA, 84 bp, Artificial
  Barcode component
  misc_feature (33)..(34): n is a, c, g, or t
  misc_feature (43)..(44): n is a, c, g, or t
  misc_feature (53)..(54): n is a, c, g, or t
tttttttaagcagtggtatcaacgcagagtacnntgtgtgtgnnagaggcatnntttttttttttttttttttttttttttttt

SEQ ID NO: 959 - DNA, 84 bp, Artificial
  Barcode component
  misc_feature (33)..(34): n is a, c, g, or t
  misc_feature (43)..(44): n is a, c, g, or t
  misc_feature (53)..(54): n is a, c, g, or t
tttttttaagcagtggtatcaacgcagagtacnntgtgtgtgnntgcatagcnntttttttttttttttttttttttttttttt

SEQ ID NO: 960 - DNA, 84 bp, Artificial
  Barcode component
  misc_feature (33)..(34): n is a, c, g, or t
  misc_feature (43)..(44): n is a, c, g, or t
  misc_feature (53)..(54): n is a, c, g, or t
tttttttaagcagtggtatcaacgcagagtacnntgtgtgtgnnctaacgganntttttttttttttttttttttttttttttt

SEQ ID NO: 961 - DNA, 84 bp, Artificial
  Barcode component
  misc_feature (33)..(34): n is a, c, g, or t
  misc_feature (43)..(44): n is a, c, g, or t
  misc_feature (53)..(54): n is a, c, g, or t
tttttttaagcagtggtatcaacgcagagtacnntgtgtgtgnntatcgaggnntttttttttttttttttttttttttttttt

SEQ ID NO: 962 - DNA, 84 bp, Artificial
  Barcode component
  misc_feature (33)..(34): n is a, c, g, or t
  misc_feature (43)..(44): n is a, c, g, or t
  misc_feature (53)..(54): n is a, c, g, or t
tttttttaagcagtggtatcaacgcagagtacnntgtgtgtgnncatagcctnntttttttttttttttttttttttttttttt

SEQ ID NO: 963 - DNA, 84 bp, Artificial
  Barcode component
  misc_feature (33)..(34): n is a, c, g, or t
  misc_feature (43)..(44): n is a, c, g, or t
  misc_feature (53)..(54): n is a, c, g, or t
tttttttaagcagtggtatcaacgcagagtacnntgtgtgtgnnatcgagacnntttttttttttttttttttttttttttttt

SEQ ID NO: 964 - DNA, 84 bp, Artificial
  Barcode component
  misc_feature (33)..(34): n is a, c, g, or t
  misc_feature (43)..(44): n is a, c, g, or t
  misc_feature (53)..(54): n is a, c, g, or t
tttttttaagcagtggtatcaacgcagagtacnntgtgtgtgnnggaagagtnntttttttttttttttttttttttttttttt

SEQ ID NO: 965 - DNA, 84 bp, Artificial
  Barcode component
  misc_feature (33)..(34): n is a, c, g, or t
  misc_feature (43)..(44): n is a, c, g, or t
  misc_feature (53)..(54): n is a, c, g, or t
tttttttaagcagtggtatcaacgcagagtacnntgtgtgtgnnccaagtagnntttttttttttttttttttttttttttttt

SEQ ID NO: 966 - DNA, 84 bp, Artificial
  Barcode component
  misc_feature (33)..(34): n is a, c, g, or t
  misc_feature (43)..(44): n is a, c, g, or t
  misc_feature (53)..(54): n is a, c, g, or t
tttttttaagcagtggtatcaacgcagagtacnntgtgtgtgnnctgaacagnntttttttttttttttttttttttttttttt

SEQ ID NO: 967 - DNA, 84 bp, Artificial
  Barcode component
  misc_feature (33)..(34): n is a, c, g, or t
  misc_feature (43)..(44): n is a, c, g, or t
  misc_feature (53)..(54): n is a, c, g, or t
tttttttaagcagtggtatcaacgcagagtacnntgtgtgtgnngtaggttcnntttttttttttttttttttttttttttttt

SEQ ID NO: 968 - DNA, 84 bp, Artificial
  Barcode component
  misc_feature (33)..(34): n is a, c, g, or t
  misc_feature (43)..(44): n is a, c, g, or t
  misc_feature (53)..(54): n is a, c, g, or t
tttttttaagcagtggtatcaacgcagagtacnntgtgtgtgnngtatggacnntttttttttttttttttttttttttttttt

SEQ ID NO: 969 - DNA, 84 bp, Artificial
  Barcode component
  misc_feature (33)..(34): n is a, c, g, or t
  misc_feature (43)..(44): n is a, c, g, or t
  misc_feature (53)..(54): n is a, c, g, or t
tttttttaagcagtggtatcaacgcagagtacnntgtgtgtgnntcgcaacanntttttttttttttttttttttttttttttt

SEQ ID NO: 970 - DNA, 84 bp, Artificial
  Barcode component
  misc_feature (33)..(34): n is a, c, g, or t
  misc_feature (43)..(44): n is a, c, g, or t
  misc_feature (53)..(54): n is a, c, g, or t
tttttttaagcagtggtatcaacgcagagtacnntgtgtgtgnnccgctaatnntttttttttttttttttttttttttttttt

SEQ ID NO: 971 - DNA, 84 bp, Artificial
  Barcode component
  misc_feature (33)..(34): n is a, c, g, or t
  misc_feature (43)..(44): n is a, c, g, or t
  misc_feature (53)..(54): n is a, c, g, or t
tttttttaagcagtggtatcaacgcagagtacnntgtgtgtgnngattcgcanntttttttttttttttttttttttttttttt

SEQ ID NO: 972 - DNA, 84 bp, Artificial
  Barcode component
  misc_feature (33)..(34): n is a, c, g, or t
  misc_feature (43)..(44): n is a, c, g, or t
  misc_feature (53)..(54): n is a, c, g, or t
tttttttaagcagtggtatcaacgcagagtacnntgtgtgtgnncgatggaanntttttttttttttttttttttttttttttt

SEQ ID NO: 973 - DNA, 84 bp, Artificial
  Barcode component
  misc_feature (33)..(34): n is a, c, g, or t
  misc_feature (43)..(44): n is a, c, g, or t
  misc_feature (53)..(54): n is a, c, g, or t
tttttttaagcagtggtatcaacgcagagtacnntgtgtgtgnnagcaagganntttttttttttttttttttttttttttttt

SEQ ID NO: 974 - DNA, 84 bp, Artificial
  Barcode component
  misc_feature (33)..(34): n is a, c, g, or t
  misc_feature (43)..(44): n is a, c, g, or t
  misc_feature (53)..(54): n is a, c, g, or t
tttttttaagcagtggtatcaacgcagagtacnntgtgtgtgnncgtagcaanntttttttttttttttttttttttttttttt

SEQ ID NO: 975 - DNA, 84 bp, Artificial
  Barcode component
  misc_feature (33)..(34): n is a, c, g, or t
  misc_feature (43)..(44): n is a, c, g, or t
  misc_feature (53)..(54): n is a, c, g, or t
tttttttaagcagtggtatcaacgcagagtacnntgtgtgtgnntggcagtanntttttttttttttttttttttttttttttt

SEQ ID NO: 976 - DNA, 84 bp, Artificial
  Barcode component
  misc_feature (33)..(34): n is a, c, g, or t
  misc_feature (43)..(44): n is a, c, g, or t
  misc_feature (53)..(54): n is a, c, g, or t
tttttttaagcagtggtatcaacgcagagtacnntgtgtgtgnncggtagttnntttttttttttttttttttttttttttttt

SEQ ID NO: 977 - DNA, 84 bp, Artificial
  Barcode component
  misc_feature (33)..(34): n is a, c, g, or t
  misc_feature (43)..(44): n is a, c, g, or t
  misc_feature (53)..(54): n is a, c, g, or t
tttttttaagcagtggtatcaacgcagagtacnntgtgtgtgnntgacttcgnntttttttttttttttttttttttttttttt

SEQ ID NO: 978 - DNA, 84 bp, Artificial
  Barcode component
  misc_feature (33)..(34): n is a, c, g, or t
  misc_feature (43)..(44): n is a, c, g, or t
  misc_feature (53)..(54): n is a, c, g, or t
tttttttaagcagtggtatcaacgcagagtacnntgtgtgtgnngagtgcaanntttttttttttttttttttttttttttttt

SEQ ID NO: 979 - DNA, 84 bp, Artificial
  Barcode component
  misc_feature (33)..(34): n is a, c, g, or t
  misc_feature (43)..(44): n is a, c, g, or t
  misc_feature (53)..(54): n is a, c, g, or t
tttttttaagcagtggtatcaacgcagagtacnntgtgtgtgnnacggtaacnntttttttttttttttttttttttttttttt

SEQ ID NO: 980 - DNA, 84 bp, Artificial
  Barcode component
  misc_feature (33)..(34): n is a, c, g, or t
  misc_feature (43)..(44): n is a, c, g, or t
  misc_feature (53)..(54): n is a, c, g, or t
tttttttaagcagtggtatcaacgcagagtacnntgtgtgtgnnaagtggtgnntttttttttttttttttttttttttttttt

SEQ ID NO: 981 - DNA, 84 bp, Artificial
  Barcode component
  misc_feature (33)..(34): n is a, c, g, or t
  misc_feature (43)..(44): n is a, c, g, or t
  misc_feature (53)..(54): n is a, c, g, or t
tttttttaagcagtggtatcaacgcagagtacnntgtgtgtgnnggagacaanntttttttttttttttttttttttttttttt

SEQ ID NO: 982 - DNA, 84 bp, Artificial
  Barcode component
  misc_feature (33)..(34): n is a, c, g, or t
  misc_feature (43)..(44): n is a, c, g, or t
  misc_feature (53)..(54): n is a, c, g, or t
tttttttaagcagtggtatcaacgcagagtacnntgtgtgtgnntcaaggacnntttttttttttttttttttttttttttttt

SEQ ID NO: 983 - DNA, 84 bp, Artificial
  Barcode component
  misc_feature (33)..(34): n is a, c, g, or t
  misc_feature (43)..(44): n is a, c, g, or t
  misc_feature (53)..(54): n is a, c, g, or t
tttttttaagcagtggtatcaacgcagagtacnntgtgtgtgnnaagagagcnntttttttttttttttttttttttttttttt

SEQ ID NO: 984 - DNA, 84 bp, Artificial
  Barcode component
  misc_feature (33)..(34): n is a, c, g, or t
  misc_feature (43)..(44): n is a, c, g, or t
  misc_feature (53)..(54): n is a, c, g, or t
tttttttaagcagtggtatcaacgcagagtacnntgtgtgtgnncgagagatnntttttttttttttttttttttttttttttt

SEQ ID NO: 985 - DNA, 84 bp, Artificial
  Barcode component
  misc_feature (33)..(34): n is a, c, g, or t
  misc_feature (43)..(44): n is a, c, g, or t
  misc_feature (53)..(54): n is a, c, g, or t
tttttttaagcagtggtatcaacgcagagtacnntgtgtgtgnnacagatggnntttttttttttttttttttttttttttttt

SEQ ID NO: 986 - DNA, 84 bp, Artificial
  Barcode component
  misc_feature (33)..(34): n is a, c, g, or t
  misc_feature (43)..(44): n is a, c, g, or t
  misc_feature (53)..(54): n is a, c, g, or t
tttttttaagcagtggtatcaacgcagagtacnntgtgtgtgnnaggagtcanntttttttttttttttttttttttttttttt

SEQ ID NO: 987 - DNA, 84 bp, Artificial
  Barcode component
  misc_feature (33)..(34): n is a, c, g, or t
  misc_feature (43)..(44): n is a, c, g, or t
  misc_feature (53)..(54): n is a, c, g, or t
tttttttaagcagtggtatcaacgcagagtacnntgtgtgtgnncgtgttacnntttttttttttttttttttttttttttttt

SEQ ID NO: 988 - DNA, 84 bp, Artificial
  Barcode component
  misc_feature (33)..(34): n is a, c, g, or t
  misc_feature (43)..(44): n is a, c, g, or t
  misc_feature (53)..(54): n is a, c, g, or t
tttttttaagcagtggtatcaacgcagagtacnntgtgtgtgnntagtgtgcnntttttttttttttttttttttttttttttt

SEQ ID NO: 989 - DNA, 84 bp, Artificial
  Barcode component
  misc_feature (33)..(34): n is a, c, g, or t
  misc_feature (43)..(44): n is a, c, g, or t
  misc_feature (53)..(54): n is a, c, g, or t
tttttttaagcagtggtatcaacgcagagtacnntgtgtgtgnnctcatgacnntttttttttttttttttttttttttttttt

SEQ ID NO: 990 - DNA, 84 bp, Artificial
  Barcode component
  misc_feature (33)..(34): n is a, c, g, or t
  misc_feature (43)..(44): n is a, c, g, or t
  misc_feature (53)..(54): n is a, c, g, or t
tttttttaagcagtggtatcaacgcagagtacnntgtgtgtgnngtatccagnntttttttttttttttttttttttttttttt

SEQ ID NO: 991 - DNA, 84 bp, Artificial
  Barcode component
  misc_feature (33)..(34): n is a, c, g, or t
  misc_feature (43)..(44): n is a, c, g, or t
  misc_feature (53)..(54): n is a, c, g, or t
tttttttaagcagtggtatcaacgcagagtacnntgtgtgtgnnacgcctatnntttttttttttttttttttttttttttttt

SEQ ID NO: 992 - DNA, 84 bp, Artificial
  Barcode component
  misc_feature (33)..(34): n is a, c, g, or t
  misc_feature (43)..(44): n is a, c, g, or t
  misc_feature (53)..(54): n is a, c, g, or t
tttttttaagcagtggtatcaacgcagagtacnntgtgtgtgnnaacgacctnntttttttttttttttttttttttttttttt

SEQ ID NO: 993 - DNA, 84 bp, Artificial
  Barcode component
  misc_feature (33)..(34): n is a, c, g, or t
  misc_feature (43)..(44): n is a, c, g, or t
  misc_feature (53)..(54): n is a, c, g, or t
tttttttaagcagtggtatcaacgcagagtacnntgtgtgtgnnatcaggctnntttttttttttttttttttttttttttttt

SEQ ID NO: 994 - DNA, 84 bp, Artificial
  Barcode component
  misc_feature (33)..(34): n is a, c, g, or t
  misc_feature (43)..(44): n is a, c, g, or t
  misc_feature (53)..(54): n is a, c, g, or t
tttttttaagcagtggtatcaacgcagagtacnntgtgtgtgnncaagttcgnntttttttttttttttttttttttttttttt

SEQ ID NO: 995 - DNA, 84 bp, Artificial
  Barcode component
  misc_feature (33)..(34): n is a, c, g, or t
  misc_feature (43)..(44): n is a, c, g, or t
  misc_feature (53)..(54): n is a, c, g, or t
tttttttaagcagtggtatcaacgcagagtacnntgtgtgtgnntagccaganntttttttttttttttttttttttttttttt

SEQ ID NO: 996 - DNA, 84 bp, Artificial
  Barcode component
  misc_feature (33)..(34): n is a, c, g, or t
  misc_feature (43)..(44): n is a, c, g, or t
  misc_feature (53)..(54): n is a, c, g, or t
tttttttaagcagtggtatcaacgcagagtacnntgtgtgtgnncaatcacgnntttttttttttttttttttttttttttttt

SEQ ID NO: 997 - DNA, 84 bp, Artificial
  Barcode component
  misc_feature (33)..(34): n is a, c, g, or t
  misc_feature (43)..(44): n is a, c, g, or t
  misc_feature (53)..(54): n is a, c, g, or t
tttttttaagcagtggtatcaacgcagagtacnntgtgtgtgnngcaacaagnntttttttttttttttttttttttttttttt

SEQ ID NO: 998 - DNA, 84 bp, Artificial
  Barcode component
  misc_feature (33)..(34): n is a, c, g, or t
  misc_feature (43)..(44): n is a, c, g, or t
  misc_feature (53)..(54): n is a, c, g, or t
tttttttaagcagtggtatcaacgcagagtacnntgtgtgtgnncacgacaanntttttttttttttttttttttttttttttt

SEQ ID NO: 999 - DNA, 84 bp, Artificial
  Barcode component
  misc_feature (33)..(34): n is a, c, g, or t
  misc_feature (43)..(44): n is a, c, g, or t
  misc_feature (53)..(54): n is a, c, g, or t
tttttttaagcagtggtatcaacgcagagtacnntgtgtgtgnntacggaganntttttttttttttttttttttttttttttt

SEQ ID NO: 1000 - DNA, 84 bp, Artificial
  Barcode component
  misc_feature (33)..(34): n is a, c, g, or t
  misc_feature (43)..(44): n is a, c, g, or t
  misc_feature (53)..(54): n is a, c, g, or t
tttttttaagcagtggtatcaacgcagagtacnntgtgtgtgnncgacaaganntttttttttttttttttttttttttttttt

SEQ ID NO: 1001 - DNA, 84 bp, Artificial
  Barcode component
  misc_feature (33)..(34): n is a, c, g, or t
  misc_feature (43)..(44): n is a, c, g, or t
  misc_feature (53)..(54): n is a, c, g, or t
tttttttaagcagtggtatcaacgcagagtacnntgtgtgtgnncgaagtganntttttttttttttttttttttttttttttt

SEQ ID NO: 1002 - DNA, 84 bp, Artificial
  Barcode component
  misc_feature (33)..(34): n is a, c, g, or t
  misc_feature (43)..(44): n is a, c, g, or t
  misc_feature (53)..(54): n is a, c, g, or t
tttttttaagcagtggtatcaacgcagagtacnntgtgtgtgnnagctggtanntttttttttttttttttttttttttttttt

SEQ ID NO: 1003 - DNA, 84 bp, Artificial
  Barcode component
  misc_feature (33)..(34): n is a, c, g, or t
  misc_feature (43)..(44): n is a, c, g, or t
  misc_feature (53)..(54): n is a, c, g, or t
tttttttaagcagtggtatcaacgcagagtacnntgtgtgtgnnaactaggcnntttttttttttttttttttttttttttttt

SEQ ID NO: 1004 - DNA, 84 bp, Artificial
  Barcode component
  misc_feature (33)..(34): n is a, c, g, or t
  misc_feature (43)..(44): n is a, c, g, or t
  misc_feature (53)..(54): n is a, c, g, or t
tttttttaagcagtggtatcaacgcagagtacnntgtgtgtgnncagcaagtnntttttttttttttttttttttttttttttt

SEQ ID NO: 1005 - DNA, 84 bp, Artificial
  Barcode component
  misc_feature (33)..(34): n is a, c, g, or t
  misc_feature (43)..(44): n is a, c, g, or t
  misc_feature (53)..(54): n is a, c, g, or t
tttttttaagcagtggtatcaacgcagagtacnntgtgtgtgnnacgaggtanntttttttttttttttttttttttttttttt

SEQ ID NO: 1006 - DNA, 84 bp, Artificial
  Barcode component
  misc_feature (33)..(34): n is a, c, g, or t
  misc_feature (43)..(44): n is a, c, g, or t
  misc_feature (53)..(54): n is a, c, g, or t
tttttttaagcagtggtatcaacgcagagtacnntgtgtgtgnncatcttccnntttttttttttttttttttttttttttttt

SEQ ID NO: 1007 - DNA, 84 bp, Artificial
  Barcode component
  misc_feature (33)..(34): n is a, c, g, or t
  misc_feature (43)..(44): n is a, c, g, or t
  misc_feature (53)..(54): n is a, c, g, or t
tttttttaagcagtggtatcaacgcagagtacnntgtgtgtgnncctgaatcnntttttttttttttttttttttttttttttt

SEQ ID NO: 1008 - DNA, 84 bp, Artificial
  Barcode component
  misc_feature (33)..(34): n is a, c, g, or t
  misc_feature (43)..(44): n is a, c, g, or t
  misc_feature (53)..(54): n is a, c, g, or t
tttttttaagcagtggtatcaacgcagagtacnntgtgtgtgnntgcagactnntttttttttttttttttttttttttttttt

SEQ ID NO: 1009 - DNA, 84 bp, Artificial
  Barcode component
  misc_feature (33)..(34): n is a, c, g, or t
  misc_feature (43)..(44): n is a, c, g, or t
  misc_feature (53)..(54): n is a, c, g, or t
tttttttaagcagtggtatcaacgcagagtacnntgtgtgtgnnagatgtggnntttttttttttttttttttttttttttttt

SEQ ID NO: 1010 - DNA, 84 bp, Artificial
  Barcode component
  misc_feature (33)..(34): n is a, c, g, or t
  misc_feature (43)..(44): n is a, c, g, or t
  misc_feature (53)..(54): n is a, c, g, or t
tttttttaagcagtggtatcaacgcagagtacnntgtgtgtgnnagttcgacnntttttttttttttttttttttttttttttt

SEQ ID NO: 1011 - DNA, 84 bp, Artificial
  Barcode component
  misc_feature (33)..(34): n is a, c, g, or t
  misc_feature (43)..(44): n is a, c, g, or t
  misc_feature (53)..(54): n is a, c, g, or t
tttttttaagcagtggtatcaacgcagagtacnntgtgtgtgnnacaacctcnntttttttttttttttttttttttttttttt

SEQ ID NO: 1012 - DNA, 84 bp, Artificial
  Barcode component
  misc_feature (33)..(34): n is a, c, g, or t
  misc_feature (43)..(44): n is a, c, g, or t
  misc_feature (53)..(54): n is a, c, g, or t
tttttttaagcagtggtatcaacgcagagtacnntgtgtgtgnncatggtagnntttttttttttttttttttttttttttttt

SEQ ID NO: 1013 - DNA, 84 bp, Artificial
  Barcode component
  misc_feature (33)..(34): n is a, c, g, or t
  misc_feature (43)..(44): n is a, c, g, or t
  misc_feature (53)..(54): n is a, c, g, or t
tttttttaagcagtggtatcaacgcagagtacnntgtgtgtgnncgtatctcnntttttttttttttttttttttttttttttt

SEQ ID NO: 1014 - DNA, 84 bp, Artificial
  Barcode component
  misc_feature (33)..(34): n is a, c, g, or t
  misc_feature (43)..(44): n is a, c, g, or t
  misc_feature (53)..(54): n is a, c, g, or t
tttttttaagcagtggtatcaacgcagagtacnntgtgtgtgnncctagttcnntttttttttttttttttttttttttttttt

SEQ ID NO: 1015 - DNA, 84 bp, Artificial
  Barcode component
  misc_feature (33)..(34): n is a, c, g, or t
  misc_feature (43)..(44): n is a, c, g, or t
  misc_feature (53)..(54): n is a, c, g, or t
tttttttaagcagtggtatcaacgcagagtacnntgtgtgtgnncaagagtcnntttttttttttttttttttttttttttttt

SEQ ID NO: 1016 - DNA, 84 bp, Artificial
  Barcode component
  misc_feature (33)..(34): n is a, c, g, or t
  misc_feature (43)..(44): n is a, c, g, or t
  misc_feature (53)..(54): n is a, c, g, or t
tttttttaagcagtggtatcaacgcagagtacnntggcctaannaatcggcanntttttttttttttttttttttttttttttt

SEQ ID NO: 1017 - DNA, 84 bp, Artificial
  Barcode component
  misc_feature (33)..(34): n is a, c, g, or t
  misc_feature (43)..(44): n is a, c, g, or t
  misc_feature (53)..(54): n is a, c, g, or t
tttttttaagcagtggtatcaacgcagagtacnntggcctaanntacggcatnntttttttttttttttttttttttttttttt

SEQ ID NO: 1018 - DNA, 84 bp, Artificial
  Barcode component
  misc_feature (33)..(34): n is a, c, g, or t
  misc_feature (43)..(44): n is a, c, g, or t
  misc_feature (53)..(54): n is a, c, g, or t
tttttttaagcagtggtatcaacgcagagtacnntggcctaannttggatcgnntttttttttttttttttttttttttttttt

SEQ ID NO: 1019 - DNA, 84 bp, Artificial
  Barcode component
  misc_feature (33)..(34): n is a, c, g, or t
  misc_feature (43)..(44): n is a, c, g, or t
  misc_feature (53)..(54): n is a, c, g, or t
tttttttaagcagtggtatcaacgcagagtacnntggcctaanntggaacganntttttttttttttttttttttttttttttt

SEQ ID NO: 1020 - DNA, 84 bp, Artificial
  Barcode component
  misc_feature (33)..(34): n is a, c, g, or t
  misc_feature (43)..(44): n is a, c, g, or t
  misc_feature (53)..(54): n is a, c, g, or t
tttttttaagcagtggtatcaacgcagagtacnntggcctaannggcaatcanntttttttttttttttttttttttttttttt

SEQ ID NO: 1021 - DNA, 84 bp, Artificial
  Barcode component
  misc_feature (33)..(34): n is a, c, g, or t
  misc_feature (43)..(44): n is a, c, g, or t
  misc_feature (53)..(54): n is a, c, g, or t
tttttttaagcagtggtatcaacgcagagtacnntggcctaanngaatccganntttttttttttttttttttttttttttttt

SEQ ID NO: 1022 - DNA, 84 bp, Artificial
  Barcode component
  misc_feature (33)..(34): n is a, c, g, or t
  misc_feature (43)..(44): n is a, c, g, or t
  misc_feature (53)..(54): n is a, c, g, or t
tttttttaagcagtggtatcaacgcagagtacnntggcctaannttacggtgnntttttttttttttttttttttttttttttt

SEQ ID NO: 1023 - DNA, 84 bp, Artificial
  Barcode component
  misc_feature (33)..(34): n is a, c, g, or t
  misc_feature (43)..(44): n is a, c, g, or t
  misc_feature (53)..(54): n is a, c, g, or t
tttttttaagcagtggtatcaacgcagagtacnntggcctaanncatatcggnntttttttttttttttttttttttttttttt

SEQ ID NO: 1024 - DNA, 84 bp, Artificial
  Barcode component
  misc_feature (33)..(34): n is a, c, g, or t
  misc_feature (43)..(44): n is a, c, g, or t
  misc_feature (53)..(54): n is a, c, g, or t
tttttttaagcagtggtatcaacgcagagtacnntggcctaanncttcggtanntttttttttttttttttttttttttttttt

SEQ ID NO: 1025 - DNA, 84 bp, Artificial
  Barcode component
  misc_feature (33)..(34): n is a, c, g, or t
  misc_feature (43)..(44): n is a, c, g, or t
  misc_feature (53)..(54): n is a, c, g, or t
tttttttaagcagtggtatcaacgcagagtacnntggcctaanntcctaacgnntttttttttttttttttttttttttttttt

SEQ ID NO: 1026 - DNA, 84 bp, Artificial
  Barcode component
  misc_feature (33)..(34): n is a, c, g, or t
  misc_feature (43)..(44): n is a, c, g, or t
  misc_feature (53)..(54): n is a, c, g, or t
tttttttaagcagtggtatcaacgcagagtacnntggcctaanngtaagccanntttttttttttttttttttttttttttttt

SEQ ID NO: 1027 - DNA, 84 bp, Artificial
  Barcode component
  misc_feature (33)..(34): n is a, c, g, or t
  misc_feature (43)..(44): n is a, c, g, or t
  misc_feature (53)..(54): n is a, c, g, or t
tttttttaagcagtggtatcaacgcagagtacnntggcctaanntaaggtggnntttttttttttttttttttttttttttttt

SEQ ID NO: 1028 - DNA, 84 bp, Artificial
  Barcode component
  misc_feature (33)..(34): n is a, c, g, or t
  misc_feature (43)..(44): n is a, c, g, or t
  misc_feature (53)..(54): n is a, c, g, or t
tttttttaagcagtggtatcaacgcagagtacnntggcctaannggtaagctnntttttttttttttttttttttttttttttt

SEQ ID NO: 1029 - DNA, 84 bp, Artificial
  Barcode component
  misc_feature (33)..(34): n is a, c, g, or t
  misc_feature (43)..(44): n is a, c, g, or t
  misc_feature (53)..(54): n is a, c, g, or t
tttttttaagcagtggtatcaacgcagagtacnntggcctaanntgtgtcganntttttttttttttttttttttttttttttt

SEQ ID NO: 1030 - DNA, 84 bp, Artificial
  Barcode component
  misc_feature (33)..(34): n is a, c, g, or t
  misc_feature (43)..(44): n is a, c, g, or t
  misc_feature (53)..(54): n is a, c, g, or t
tttttttaagcagtggtatcaacgcagagtacnntggcctaanngagcatganntttttttttttttttttttttttttttttt

SEQ ID NO: 1031 - DNA, 84 bp, Artificial
  Barcode component
  misc_feature (33)..(34): n is a, c, g, or t
  misc_feature (43)..(44): n is a, c, g, or t
  misc_feature (53)..(54): n is a, c, g, or t
tttttttaagcagtggtatcaacgcagagtacnntggcctaanntcgaagtcnntttttttttttttttttttttttttttttt

SEQ ID NO: 1032 - DNA, 84 bp, Artificial
  Barcode component
  misc_feature (33)..(34): n is a, c, g, or t
  misc_feature (43)..(44): n is a, c, g, or t
  misc_feature (53)..(54): n is a, c, g, or t
tttttttaagcagtggtatcaacgcagagtacnntggcctaannggtgaacanntttttttttttttttttttttttttttttt

SEQ ID NO: 1033 - DNA, 84 bp, Artificial
  Barcode component
  misc_feature (33)..(34): n is a, c, g, or t
  misc_feature (43)..(44): n is a, c, g, or t
  misc_feature (53)..(54): n is a, c, g, or t
tttttttaagcagtggtatcaacgcagagtacnntggcctaannacatgcacnntttttttttttttttttttttttttttttt

SEQ ID NO: 1034 - DNA, 84 bp, Artificial
  Barcode component
  misc_feature (33)..(34): n is a, c, g, or t
  misc_feature (43)..(44): n is a, c, g, or t
  misc_feature (53)..(54): n is a, c, g, or t
tttttttaagcagtggtatcaacgcagagtacnntggcctaannccaacagtnntttttttttttttttttttttttttttttt

SEQ ID NO: 1035 - DNA, 84 bp, Artificial
  Barcode component
  misc_feature (33)..(34): n is a, c, g, or t
  misc_feature (43)..(44): n is a, c, g, or t
  misc_feature (53)..(54): n is a, c, g, or t
tttttttaagcagtggtatcaacgcagagtacnntggcctaannagaacagcnntttttttttttttttttttttttttttttt

SEQ ID NO: 1036 - DNA, 84 bp, Artificial
  Barcode component
  misc_feature (33)..(34): n is a, c, g, or t
  misc_feature (43)..(44): n is a, c, g, or t
  misc_feature (53)..(54): n is a, c, g, or t
tttttttaagcagtggtatcaacgcagagtacnntggcctaanngaacacgtnntttttttttttttttttttttttttttttt

SEQ ID NO: 1037 - DNA, 84 bp, Artificial
  Barcode component
  misc_feature (33)..(34): n is a, c, g, or t
  misc_feature (43)..(44): n is a, c, g, or t
  misc_feature (53)..(54): n is a, c, g, or t
tttttttaagcagtggtatcaacgcagagtacnntggcctaannggtcttcanntttttttttttttttttttttttttttttt

SEQ ID NO: 1038 - DNA, 84 bp, Artificial
  Barcode component
  misc_feature (33)..(34): n is a, c, g, or t
  misc_feature (43)..(44): n is a, c, g, or t
  misc_feature (53)..(54): n is a, c, g, or t
tttttttaagcagtggtatcaacgcagagtacnntggcctaannaggttcagnntttttttttttttttttttttttttttttt

SEQ ID NO: 1039 - DNA, 84 bp, Artificial
  Barcode component
  misc_feature (33)..(34): n is a, c, g, or t
  misc_feature (43)..(44): n is a, c, g, or t
  misc_feature (53)..(54): n is a, c, g, or t
tttttttaagcagtggtatcaacgcagagtacnntggcctaannctagagcanntttttttttttttttttttttttttttttt

SEQ ID NO: 1040 - DNA, 84 bp, Artificial
  Barcode component
  misc_feature (33)..(34): n is a, c, g, or t
  misc_feature (43)..(44): n is a, c, g, or t
  misc_feature (53)..(54): n is a, c, g, or t
tttttttaagcagtggtatcaacgcagagtacnntggcctaanncttctagcnntttttttttttttttttttttttttttttt

SEQ ID NO: 1041 - DNA, 84 bp, Artificial
  Barcode component
  misc_feature (33)..(34): n is a, c, g, or t
  misc_feature (43)..(44): n is a, c, g, or t
  misc_feature (53)..(54): n is a, c, g, or t
tttttttaagcagtggtatcaacgcagagtacnntggcctaanngagtaacgnntttttttttttttttttttttttttttttt

SEQ ID NO: 1042 - DNA, 84 bp, Artificial
  Barcode component
  misc_feature (33)..(34): n is a, c, g, or t
  misc_feature (43)..(44): n is a, c, g, or t
  misc_feature (53)..(54): n is a, c, g, or t
tttttttaagcagtggtatcaacgcagagtacnntggcctaannctaagaggnntttttttttttttttttttttttttttttt

SEQ ID NO: 1043 - DNA, 84 bp, Artificial
  Barcode component
  misc_feature (33)..(34): n is a, c, g, or t
  misc_feature (43)..(44): n is a, c, g, or t
  misc_feature (53)..(54): n is a, c, g, or t
tttttttaagcagtggtatcaacgcagagtacnntggcctaannacgtgtagnntttttttttttttttttttttttttttttt

SEQ ID NO: 1044 - DNA, 84 bp, Artificial
  Barcode component
  misc_feature (33)..(34): n is a, c, g, or t
  misc_feature (43)..(44): n is a, c, g, or t
  misc_feature (53)..(54): n is a, c, g, or t
tttttttaagcagtggtatcaacgcagagtacnntggcctaannactacaggnntttttttttttttttttttttttttttttt

SEQ ID NO: 1045 - DNA, 84 bp, Artificial
  Barcode component
  misc_feature (33)..(34): n is a, c, g, or t
  misc_feature (43)..(44): n is a, c, g, or t
  misc_feature (53)..(54): n is a, c, g, or t
tttttttaagcagtggtatcaacgcagagtacnntggcctaanntacaggtcnntttttttttttttttttttttttttttttt

SEQ ID NO: 1046 - DNA, 84 bp, Artificial
  Barcode component
  misc_feature (33)..(34): n is a, c, g, or t
  misc_feature (43)..(44): n is a, c, g, or t
  misc_feature (53)..(54): n is a, c, g, or t
tttttttaagcagtggtatcaacgcagagtacnntggcctaannctcacatgnntttttttttttttttttttttttttttttt

SEQ ID NO: 1047 - DNA, 84 bp, Artificial
  Barcode component
  misc_feature (33)..(34): n is a, c, g, or t
  misc_feature (43)..(44): n is a, c, g, or t
  misc_feature (53)..(54): n is a, c, g, or t
tttttttaagcagtggtatcaacgcagagtacnntggcctaannactaggagnntttttttttttttttttttttttttttttt

SEQ ID NO: 1048 - DNA, 84 bp, Artificial
  Barcode component
  misc_feature (33)..(34): n is a, c, g, or t
  misc_feature (43)..(44): n is a, c, g, or t
  misc_feature (53)..(54): n is a, c, g, or t
tttttttaagcagtggtatcaacgcagagtacnntggcctaannccatagganntttttttttttttttttttttttttttttt

SEQ ID NO: 1049 - DNA, 84 bp, Artificial
  Barcode component
  misc_feature (33)..(34): n is a, c, g, or t
  misc_feature (43)..(44): n is a, c, g, or t
  misc_feature (53)..(54): n is a, c, g, or t
tttttttaagcagtggtatcaacgcagagtacnntggcctaannggagaatcnntttttttttttttttttttttttttttttt

SEQ ID NO: 1050 - DNA, 84 bp, Artificial
  Barcode component
  misc_feature (33)..(34): n is a, c, g, or t
  misc_feature (43)..(44): n is a, c, g, or t
  misc_feature (53)..(54): n is a, c, g, or t
tttttttaagcagtggtatcaacgcagagtacnntggcctaanngccaagaanntttttttttttttttttttttttttttttt

SEQ ID NO: 1051 - DNA, 84 bp, Artificial
  Barcode component
  misc_feature (33)..(34): n is a, c, g, or t
  misc_feature (43)..(44): n is a, c, g, or t
  misc_feature (53)..(54): n is a, c, g, or t
tttttttaagcagtggtatcaacgcagagtacnntggcctaannaaggcaagnntttttttttttttttttttttttttttttt

SEQ ID NO: 1052 - DNA, 84 bp, Artificial
  Barcode component
  misc_feature (33)..(34): n is a, c, g, or t
  misc_feature (43)..(44): n is a, c, g, or t
  misc_feature (53)..(54): n is a, c, g, or t
tttttttaagcagtggtatcaacgcagagtacnntggcctaannaatgtcgcnntttttttttttttttttttttttttttttt

SEQ ID NO: 1053 - DNA, 84 bp, Artificial
  Barcode component
  misc_feature (33)..(34): n is a, c, g, or t
  misc_feature (43)..(44): n is a, c, g, or t
  misc_feature (53)..(54): n is a, c, g, or t
tttttttaagcagtggtatcaacgcagagtacnntggcctaannatggaaccnntttttttttttttttttttttttttttttt

SEQ ID NO: 1054 - DNA, 84 bp, Artificial
  Barcode component
  misc_feature (33)..(34): n is a, c, g, or t
  misc_feature (43)..(44): n is a, c, g, or t
  misc_feature (53)..(54): n is a, c, g, or t
tttttttaagcagtggtatcaacgcagagtacnntggcctaannagaggcatnntttttttttttttttttttttttttttttt

SEQ ID NO: 1055 - DNA, 84 bp, Artificial
  Barcode component
  misc_feature (33)..(34): n is a, c, g, or t
  misc_feature (43)..(44): n is a, c, g, or t
  misc_feature (53)..(54): n is a, c, g, or t
tttttttaagcagtggtatcaacgcagagtacnntggcctaanntgcatagcnntttttttttttttttttttttttttttttt

SEQ ID NO: 1056 - DNA, 84 bp, Artificial
  Barcode component
  misc_feature (33)..(34): n is a, c, g, or t
  misc_feature (43)..(44): n is a, c, g, or t
  misc_feature (53)..(54): n is a, c, g, or t
tttttttaagcagtggtatcaacgcagagtacnntggcctaannctaacgganntttttttttttttttttttttttttttttt

SEQ ID NO: 1057 - DNA, 84 bp, Artificial
  Barcode component
  misc_feature (33)..(34): n is a, c, g, or t
  misc_feature (43)..(44): n is a, c, g, or t
  misc_feature (53)..(54): n is a, c, g, or t
tttttttaagcagtggtatcaacgcagagtacnntggcctaanntatcgaggnntttttttttttttttttttttttttttttt

SEQ ID NO: 1058 - DNA, 84 bp, Artificial
  Barcode component
  misc_feature (33)..(34): n is a, c, g, or t
  misc_feature (43)..(44): n is a, c, g, or t
  misc_feature (53)..(54): n is a, c, g, or t
tttttttaagcagtggtatcaacgcagagtacnntggcctaanncatagcctnntttttttttttttttttttttttttttttt

SEQ ID NO: 1059 - DNA, 84 bp, Artificial
  Barcode component
  misc_feature (33)..(34): n is a, c, g, or t
  misc_feature (43)..(44): n is a, c, g, or t
  misc_feature (53)..(54): n is a, c, g, or t
tttttttaagcagtggtatcaacgcagagtacnntggcctaannatcgagacnntttttttttttttttttttttttttttttt

SEQ ID NO: 1060 - DNA, 84 bp, Artificial
  Barcode component
  misc_feature (33)..(34): n is a, c, g, or t
  misc_feature (43)..(44): n is a, c, g, or t
  misc_feature (53)..(54): n is a, c, g, or t
tttttttaagcagtggtatcaacgcagagtacnntggcctaannggaagagtnntttttttttttttttttttttttttttttt

SEQ ID NO: 1061 - DNA, 84 bp, Artificial
  Barcode component
  misc_feature (33)..(34): n is a, c, g, or t
  misc_feature (43)..(44): n is a, c, g, or t
  misc_feature (53)..(54): n is a, c, g, or t
tttttttaagcagtggtatcaacgcagagtacnntggcctaannccaagtagnntttttttttttttttttttttttttttttt

SEQ ID NO: 1062 - DNA, 84 bp, Artificial
  Barcode component
  misc_feature (33)..(34): n is a, c, g, or t
  misc_feature (43)..(44): n is a, c, g, or t
  misc_feature (53)..(54): n is a, c, g, or t
tttttttaagcagtggtatcaacgcagagtacnntggcctaannctgaacagnntttttttttttttttttttttttttttttt

SEQ ID NO: 1063 - DNA, 84 bp, Artificial
  Barcode component
  misc_feature (33)..(34): n is a, c, g, or t
  misc_feature (43)..(44): n is a, c, g, or t
  misc_feature (53)..(54): n is a, c, g, or t
tttttttaagcagtggtatcaacgcagagtacnntggcctaanngtaggttcnntttttttttttttttttttttttttttttt

SEQ ID NO: 1064 - DNA, 84 bp, Artificial
  Barcode component
  misc_feature (33)..(34): n is a, c, g, or t
  misc_feature (43)..(44): n is a, c, g, or t
  misc_feature (53)..(54): n is a, c, g, or t
tttttttaagcagtggtatcaacgcagagtacnntggcctaanngtatggacnntttttttttttttttttttttttttttttt

SEQ ID NO: 1065 - DNA, 84 bp, Artificial
  Barcode component
  misc_feature (33)..(34): n is a, c, g, or t
  misc_feature (43)..(44): n is a, c, g, or t
  misc_feature (53)..(54): n is a, c, g, or t
tttttttaagcagtggtatcaacgcagagtacnntggcctaanntcgcaacanntttttttttttttttttttttttttttttt

SEQ ID NO: 1066 - DNA, 84 bp, Artificial
  Barcode component
  misc_feature (33)..(34): n is a, c, g, or t
  misc_feature (43)..(44): n is a, c, g, or t
  misc_feature (53)..(54): n is a, c, g, or t
tttttttaagcagtggtatcaacgcagagtacnntggcctaannccgctaatnntttttttttttttttttttttttttttttt

SEQ ID NO: 1067 - DNA, 84 bp, Artificial
  Barcode component
  misc_feature (33)..(34): n is a, c, g, or t
  misc_feature (43)..(44): n is a, c, g, or t
  misc_feature (53)..(54): n is a, c, g, or t
tttttttaagcagtggtatcaacgcagagtacnntggcctaanngattcgcanntttttttttttttttttttttttttttttt

SEQ ID NO: 1068 - DNA, 84 bp, Artificial
  Barcode component
  misc_feature (33)..(34): n is a, c, g, or t
  misc_feature (43)..(44): n is a, c, g, or t
  misc_feature (53)..(54): n is a, c, g, or t
tttttttaagcagtggtatcaacgcagagtacnntggcctaanncgatggaanntttttttttttttttttttttttttttttt

SEQ ID NO: 1069 - DNA, 84 bp, Artificial
  Barcode component
  misc_feature (33)..(34): n is a, c, g, or t
  misc_feature (43)..(44): n is a, c, g, or t
  misc_feature (53)..(54): n is a, c, g, or t
tttttttaagcagtggtatcaacgcagagtacnntggcctaannagcaagganntttttttttttttttttttttttttttttt

SEQ ID NO: 1070 - DNA, 84 bp, Artificial
  Barcode component
  misc_feature (33)..(34): n is a, c, g, or t
  misc_feature (43)..(44): n is a, c, g, or t
  misc_feature (53)..(54): n is a, c, g, or t
tttttttaagcagtggtatcaacgcagagtacnntggcctaanncgtagcaanntttttttttttttttttttttttttttttt

SEQ ID NO: 1071 - DNA, 84 bp, Artificial
  Barcode component
  misc_feature (33)..(34): n is a, c, g, or t
  misc_feature (43)..(44): n is a, c, g, or t
  misc_feature (53)..(54): n is a, c, g, or t
tttttttaagcagtggtatcaacgcagagtacnntggcctaanntggcagtanntttttttttttttttttttttttttttttt

SEQ ID NO: 1072 - DNA, 84 bp, Artificial
  Barcode component
  misc_feature (33)..(34): n is a, c, g, or t
  misc_feature (43)..(44): n is a, c, g, or t
  misc_feature (53)..(54): n is a, c, g, or t
tttttttaagcagtggtatcaacgcagagtacnntggcctaanncggtagttnntttttttttttttttttttttttttttttt

SEQ ID NO: 1073 - DNA, 84 bp, Artificial
  Barcode component
  misc_feature (33)..(34): n is a, c, g, or t
  misc_feature (43)..(44): n is a, c, g, or t
  misc_feature (53)..(54): n is a, c, g, or t
tttttttaagcagtggtatcaacgcagagtacnntggcctaanntgacttcgnntttttttttttttttttttttttttttttt

SEQ ID NO: 1074 - DNA, 84 bp, Artificial
  Barcode component
  misc_feature (33)..(34): n is a, c, g, or t
  misc_feature (43)..(44): n is a, c, g, or t
  misc_feature (53)..(54): n is a, c, g, or t
tttttttaagcagtggtatcaacgcagagtacnntggcctaanngagtgcaanntttttttttttttttttttttttttttttt

SEQ ID NO: 1075 - DNA, 84 bp, Artificial
  Barcode component
  misc_feature (33)..(34): n is a, c, g, or t
  misc_feature (43)..(44): n is a, c, g, or t
  misc_feature (53)..(54): n is a, c, g, or t
tttttttaagcagtggtatcaacgcagagtacnntggcctaannacggtaacnntttttttttttttttttttttttttttttt

SEQ ID NO: 1076 - DNA, 84 bp, Artificial
  Barcode component
  misc_feature (33)..(34): n is a, c, g, or t
  misc_feature (43)..(44): n is a, c, g, or t
  misc_feature (53)..(54): n is a, c, g, or t
tttttttaagcagtggtatcaacgcagagtacnntggcctaannaagtggtgnntttttttttttttttttttttttttttttt

SEQ ID NO: 1077 - DNA, 84 bp, Artificial
  Barcode component
  misc_feature (33)..(34): n is a, c, g, or t
  misc_feature (43)..(44): n is a, c, g, or t
  misc_feature (53)..(54): n is a, c, g, or t
tttttttaagcagtggtatcaacgcagagtacnntggcctaannggagacaanntttttttttttttttttttttttttttttt

SEQ ID NO: 1078 - DNA, 84 bp, Artificial
  Barcode component
  misc_feature (33)..(34): n is a, c, g, or t
  misc_feature (43)..(44): n is a, c, g, or t
  misc_feature (53)..(54): n is a, c, g, or t
tttttttaagcagtggtatcaacgcagagtacnntggcctaanntcaaggacnntttttttttttttttttttttttttttttt

SEQ ID NO: 1079 - DNA, 84 bp, Artificial
  Barcode component
  misc_feature (33)..(34): n is a, c, g, or t
  misc_feature (43)..(44): n is a, c, g, or t
  misc_feature (53)..(54): n is a, c, g, or t
tttttttaagcagtggtatcaacgcagagtacnntggcctaannaagagagcnntttttttttttttttttttttttttttttt

SEQ ID NO: 1080 - DNA, 84 bp, Artificial
  Barcode component
  misc_feature (33)..(34): n is a, c, g, or t
  misc_feature (43)..(44): n is a, c, g, or t
  misc_feature (53)..(54): n is a, c, g, or t
tttttttaagcagtggtatcaacgcagagtacnntggcctaanncgagagatnntttttttttttttttttttttttttttttt

SEQ ID NO: 1081 - DNA, 84 bp, Artificial
  Barcode component
  misc_feature (33)..(34): n is a, c, g, or t
  misc_feature (43)..(44): n is a, c, g, or t
  misc_feature (53)..(54): n is a, c, g, or t
tttttttaagcagtggtatcaacgcagagtacnntggcctaannacagatggnntttttttttttttttttttttttttttttt

SEQ ID NO: 1082 - DNA, 84 bp, Artificial
  Barcode component
  misc_feature (33)..(34): n is a, c, g, or t
  misc_feature (43)..(44): n is a, c, g, or t
  misc_feature (53)..(54): n is a, c, g, or t
tttttttaagcagtggtatcaacgcagagtacnntggcctaannaggagtcanntttttttttttttttttttttttttttttt

SEQ ID NO: 1083 - DNA, 84 bp, Artificial
  Barcode component
  misc_feature (33)..(34): n is a, c, g, or t
  misc_feature (43)..(44): n is a, c, g, or t
  misc_feature (53)..(54): n is a, c, g, or t
tttttttaagcagtggtatcaacgcagagtacnntggcctaanncgtgttacnntttttttttttttttttttttttttttttt

SEQ ID NO: 1084 - DNA, 84 bp, Artificial
  Barcode component
  misc_feature (33)..(34): n is a, c, g, or t
  misc_feature (43)..(44): n is a, c, g, or t
  misc_feature (53)..(54): n is a, c, g, or t
tttttttaagcagtggtatcaacgcagagtacnntggcctaanntagtgtgcnntttttttttttttttttttttttttttttt

SEQ ID NO: 1085 - DNA, 84 bp, Artificial
  Barcode component
  misc_feature (33)..(34): n is a, c, g, or t
  misc_feature (43)..(44): n is a, c, g, or t
  misc_feature (53)..(54): n is a, c, g, or t
tttttttaagcagtggtatcaacgcagagtacnntggcctaannctcatgacnntttttttttttttttttttttttttttttt

SEQ ID NO: 1086 - DNA, 84 bp, Artificial
  Barcode component
  misc_feature (33)..(34): n is a, c, g, or t
  misc_feature (43)..(44): n is a, c, g, or t
  misc_feature (53)..(54): n is a, c, g, or t
tttttttaagcagtggtatcaacgcagagtacnntggcctaanngtatccagnntttttttttttttttttttttttttttttt

SEQ ID NO: 1087 - DNA, 84 bp, Artificial
  Barcode component
  misc_feature (33)..(34): n is a, c, g, or t
  misc_feature (43)..(44): n is a, c, g, or t
  misc_feature (53)..(54): n is a, c, g, or t
tttttttaagcagtggtatcaacgcagagtacnntggcctaannacgcctatnntttttttttttttttttttttttttttttt

SEQ ID NO: 1088 - DNA, 84 bp, Artificial
  Barcode component
  misc_feature (33)..(34): n is a, c, g, or t
  misc_feature (43)..(44): n is a, c, g, or t
  misc_feature (53)..(54): n is a, c, g, or t
tttttttaagcagtggtatcaacgcagagtacnntggcctaannaacgacctnntttttttttttttttttttttttttttttt

SEQ ID NO: 1089 - DNA, 84 bp, Artificial
  Barcode component
  misc_feature (33)..(34): n is a, c, g, or t
  misc_feature (43)..(44): n is a, c, g, or t
  misc_feature (53)..(54): n is a, c, g, or t
tttttttaagcagtggtatcaacgcagagtacnntggcctaannatcaggctnntttttttttttttttttttttttttttttt

SEQ ID NO: 1090 - DNA, 84 bp, Artificial
  Barcode component
  misc_feature (33)..(34): n is a, c, g, or t
  misc_feature (43)..(44): n is a, c, g, or t
  misc_feature (53)..(54): n is a, c, g, or t
tttttttaagcagtggtatcaacgcagagtacnntggcctaanncaagttcgnntttttttttttttttttttttttttttttt

SEQ ID NO: 1091 - DNA, 84 bp, Artificial
  Barcode component
  misc_feature (33)..(34): n is a, c, g, or t
  misc_feature (43)..(44): n is a, c, g, or t
  misc_feature (53)..(54): n is a, c, g, or t
tttttttaagcagtggtatcaacgcagagtacnntggcctaanntagccaganntttttttttttttttttttttttttttttt

SEQ ID NO: 1092 - DNA, 84 bp, Artificial
  Barcode component
  misc_feature (33)..(34): n is a, c, g, or t
  misc_feature (43)..(44): n is a, c, g, or t
  misc_feature (53)..(54): n is a, c, g, or t
tttttttaagcagtggtatcaacgcagagtacnntggcctaanncaatcacgnntttttttttttttttttttttttttttttt

SEQ ID NO: 1093 - DNA, 84 bp, Artificial
  Barcode component
  misc_feature (33)..(34): n is a, c, g, or t
  misc_feature (43)..(44): n is a, c, g, or t
  misc_feature (53)..(54): n is a, c, g, or t
tttttttaagcagtggtatcaacgcagagtacnntggcctaanngcaacaagnntttttttttttttttttttttttttttttt

SEQ ID NO: 1094 - DNA, 84 bp, Artificial
  Barcode component
  misc_feature (33)..(34): n is a, c, g, or t
  misc_feature (43)..(44): n is a, c, g, or t
  misc_feature (53)..(54): n is a, c, g, or t
tttttttaagcagtggtatcaacgcagagtacnntggcctaanncacgacaanntttttttttttttttttttttttttttttt

SEQ ID NO: 1095 - DNA, 84 bp, Artificial
  Barcode component
  misc_feature (33)..(34): n is a, c, g, or t
  misc_feature (43)..(44): n is a, c, g, or t
  misc_feature (53)..(54): n is a, c, g, or t
tttttttaagcagtggtatcaacgcagagtacnntggcctaanntacggaganntttttttttttttttttttttttttttttt

SEQ ID NO: 1096 - DNA, 84 bp, Artificial
  Barcode component
  misc_feature (33)..(34): n is a, c, g, or t
  misc_feature (43)..(44): n is a, c, g, or t
  misc_feature (53)..(54): n is a, c, g, or t
tttttttaagcagtggtatcaacgcagagtacnntggcctaanncgacaaganntttttttttttttttttttttttttttttt

SEQ ID NO: 1097 - DNA, 84 bp, Artificial
  Barcode component
  misc_feature (33)..(34): n is a, c, g, or t
  misc_feature (43)..(44): n is a, c, g, or t
  misc_feature (53)..(54): n is a, c, g, or t
tttttttaagcagtggtatcaacgcagagtacnntggcctaanncgaagtganntttttttttttttttttttttttttttttt

SEQ ID NO: 1098 - DNA, 84 bp, Artificial
  Barcode component
  misc_feature (33)..(34): n is a, c, g, or t
  misc_feature (43)..(44): n is a, c, g, or t
  misc_feature (53)..(54): n is a, c, g, or t
tttttttaagcagtggtatcaacgcagagtacnntggcctaannagctggtanntttttttttttttttttttttttttttttt

SEQ ID NO: 1099 - DNA, 84 bp, Artificial
  Barcode component
  misc_feature (33)..(34): n is a, c, g, or t
  misc_feature (43)..(44): n is a, c, g, or t
  misc_feature (53)..(54): n is a, c, g, or t
tttttttaagcagtggtatcaacgcagagtacnntggcctaannaactaggcnntttttttttttttttttttttttttttttt

SEQ ID NO: 1100 - DNA, 84 bp, Artificial
  Barcode component
  misc_feature (33)..(34): n is a, c, g, or t
  misc_feature (43)..(44): n is a, c, g, or t
  misc_feature (53)..(54): n is a, c, g, or t
tttttttaagcagtggtatcaacgcagagtacnntggcctaanncagcaagtnntttttttttttttttttttttttttttttt

SEQ ID NO: 1101 - DNA, 84 bp, Artificial
  Barcode component
  misc_feature (33)..(34): n is a, c, g, or t
  misc_feature (43)..(44): n is a, c, g, or t
  misc_feature (53)..(54): n is a, c, g, or t
tttttttaagcagtggtatcaacgcagagtacnntggcctaannacgaggtanntttttttttttttttttttttttttttttt

SEQ ID NO: 1102 - DNA, 84 bp, Artificial
  Barcode component
  misc_feature (33)..(34): n is a, c, g, or t
  misc_feature (43)..(44): n is a, c, g, or t
  misc_feature (53)..(54): n is a, c, g, or t
tttttttaagcagtggtatcaacgcagagtacnntggcctaanncatcttccnntttttttttttttttttttttttttttttt

SEQ ID NO: 1103 - DNA, 84 bp, Artificial
  Barcode component
  misc_feature (33)..(34): n is a, c, g, or t
  misc_feature (43)..(44): n is a, c, g, or t
  misc_feature (53)..(54): n is a, c, g, or t
tttttttaagcagtggtatcaacgcagagtacnntggcctaanncctgaatcnntttttttttttttttttttttttttttttt

SEQ ID NO: 1104 - DNA, 84 bp, Artificial
  Barcode component
  misc_feature (33)..(34): n is a, c, g, or t
  misc_feature (43)..(44): n is a, c, g, or t
  misc_feature (53)..(54): n is a, c, g, or t
tttttttaagcagtggtatcaacgcagagtacnntggcctaanntgcagactnntttttttttttttttttttttttttttttt

SEQ ID NO: 1105 - DNA, 84 bp, Artificial
  Barcode component
  misc_feature (33)..(34): n is a, c, g, or t
  misc_feature (43)..(44): n is a, c, g, or t
  misc_feature (53)..(54): n is a, c, g, or t
tttttttaagcagtggtatcaacgcagagtacnntggcctaannagatgtggnntttttttttttttttttttttttttttttt

SEQ ID NO: 1106 - DNA, 84 bp, Artificial
  Barcode component
  misc_feature (33)..(34): n is a, c, g, or t
  misc_feature (43)..(44): n is a, c, g, or t
  misc_feature (53)..(54): n is a, c, g, or t
tttttttaagcagtggtatcaacgcagagtacnntggcctaannagttcgacnntttttttttttttttttttttttttttttt

SEQ ID NO: 1107 - DNA, 84 bp, Artificial
  Barcode component
  misc_feature (33)..(34): n is a, c, g, or t
  misc_feature (43)..(44): n is a, c, g, or t
  misc_feature (53)..(54): n is a, c, g, or t
tttttttaagcagtggtatcaacgcagagtacnntggcctaannacaacctcnntttttttttttttttttttttttttttttt

SEQ ID NO: 1108 - DNA, 84 bp, Artificial
  Barcode component
  misc_feature (33)..(34): n is a, c, g, or t
  misc_feature (43)..(44): n is a, c, g, or t
  misc_feature (53)..(54): n is a, c, g, or t
tttttttaagcagtggtatcaacgcagagtacnntggcctaanncatggtagnntttttttttttttttttttttttttttttt

SEQ ID NO: 1109 - DNA, 84 bp, Artificial
  Barcode component
  misc_feature (33)..(34): n is a, c, g, or t
  misc_feature (43)..(44): n is a, c, g, or t
  misc_feature (53)..(54): n is a, c, g, or t
tttttttaagcagtggtatcaacgcagagtacnntggcctaanncgtatctcnntttttttttttttttttttttttttttttt

SEQ ID NO: 1110 - DNA, 84 bp, Artificial
  Barcode component
  misc_feature (33)..(34): n is a, c, g, or t
  misc_feature (43)..(44): n is a, c, g, or t
  misc_feature (53)..(54): n is a, c, g, or t
tttttttaagcagtggtatcaacgcagagtacnntggcctaanncctagttcnntttttttttttttttttttttttttttttt

SEQ ID NO: 1111 - DNA, 84 bp, Artificial
  Barcode component
  misc_feature (33)..(34): n is a, c, g, or t
  misc_feature (43)..(44): n is a, c, g, or t
  misc_feature (53)..(54): n is a, c, g, or t
tttttttaagcagtggtatcaacgcagagtacnntggcctaanncaagagtcnntttttttttttttttttttttttttttttt

SEQ ID NO: 1112 - DNA, 84 bp, Artificial
  Barcode component
  misc_feature (33)..(34): n is a, c, g, or t
  misc_feature (43)..(44): n is a, c, g, or t
  misc_feature (53)..(54): n is a, c, g, or t
tttttttaagcagtggtatcaacgcagagtacnntcggacaannaatcggcanntttttttttttttttttttttttttttttt

SEQ ID NO: 1113 - DNA, 84 bp, Artificial
  Barcode component
  misc_feature (33)..(34): n is a, c, g, or t
  misc_feature (43)..(44): n is a, c, g, or t
  misc_feature (53)..(54): n is a, c, g, or t
tttttttaagcagtggtatcaacgcagagtacnntcggacaanntacggcatnntttttttttttttttttttttttttttttt

SEQ ID NO: 1114 - DNA, 84 bp, Artificial
  Barcode component
  misc_feature (33)..(34): n is a, c, g, or t
  misc_feature (43)..(44): n is a, c, g, or t
  misc_feature (53)..(54): n is a, c, g, or t
tttttttaagcagtggtatcaacgcagagtacnntcggacaannttggatcgnntttttttttttttttttttttttttttttt

SEQ ID NO: 1115 - DNA, 84 bp, Artificial
  Barcode component
  misc_feature (33)..(34): n is a, c, g, or t
  misc_feature (43)..(44): n is a, c, g, or t
  misc_feature (53)..(54): n is a, c, g, or t
tttttttaagcagtggtatcaacgcagagtacnntcggacaanntggaacganntttttttttttttttttttttttttttttt

SEQ ID NO: 1116 - DNA, 84 bp, Artificial
  Barcode component
  misc_feature (33)..(34): n is a, c, g, or t
  misc_feature (43)..(44): n is a, c, g, or t
  misc_feature (53)..(54): n is a, c, g, or t
tttttttaagcagtggtatcaacgcagagtacnntcggacaannggcaatcanntttttttttttttttttttttttttttttt

SEQ ID NO: 1117 - DNA, 84 bp, Artificial
  Barcode component
  misc_feature (33)..(34): n is a, c, g, or t
  misc_feature (43)..(44): n is a, c, g, or t
  misc_feature (53)..(54): n is a, c, g, or t
tttttttaagcagtggtatcaacgcagagtacnntcggacaanngaatccganntttttttttttttttttttttttttttttt

SEQ ID NO: 1118 - DNA, 84 bp, Artificial
  Barcode component
  misc_feature (33)..(34): n is a, c, g, or t
  misc_feature (43)..(44): n is a, c, g, or t
  misc_feature (53)..(54): n is a, c, g, or t
tttttttaagcagtggtatcaacgcagagtacnntcggacaannttacggtgnntttttttttttttttttttttttttttttt

SEQ ID NO: 1119 - DNA, 84 bp, Artificial
  Barcode component
  misc_feature (33)..(34): n is a, c, g, or t
  misc_feature (43)..(44): n is a, c, g, or t
  misc_feature (53)..(54): n is a, c, g, or t
tttttttaagcagtggtatcaacgcagagtacnntcggacaanncatatcggnntttttttttttttttttttttttttttttt

SEQ ID NO: 1120 - DNA, 84 bp, Artificial
  Barcode component
  misc_feature (33)..(34): n is a, c, g, or t
  misc_feature (43)..(44): n is a, c, g, or t
  misc_feature (53)..(54): n is a, c, g, or t
tttttttaagcagtggtatcaacgcagagtacnntcggacaanncttcggtanntttttttttttttttttttttttttttttt

SEQ ID NO: 1121 - DNA, 84 bp, Artificial
  Barcode component
  misc_feature (33)..(34): n is a, c, g, or t
  misc_feature (43)..(44): n is a, c, g, or t
  misc_feature (53)..(54): n is a, c, g, or t
tttttttaagcagtggtatcaacgcagagtacnntcggacaanntcctaacgnntttttttttttttttttttttttttttttt

SEQ ID NO: 1122 - DNA, 84 bp, Artificial
  Barcode component
  misc_feature (33)..(34): n is a, c, g, or t
  misc_feature (43)..(44): n is a, c, g, or t
  misc_feature (53)..(54): n is a, c, g, or t
tttttttaagcagtggtatcaacgcagagtacnntcggacaanngtaagccanntttttttttttttttttttttttttttttt

SEQ ID NO: 1123 - DNA, 84 bp, Artificial
  Barcode component
  misc_feature (33)..(34): n is a, c, g, or t
  misc_feature (43)..(44): n is a, c, g, or t
  misc_feature (53)..(54): n is a, c, g, or t
tttttttaagcagtggtatcaacgcagagtacnntcggacaanntaaggtggnntttttttttttttttttttttttttttttt

SEQ ID NO: 1124 - DNA, 84 bp, Artificial
  Barcode component
  misc_feature (33)..(34): n is a, c, g, or t
  misc_feature (43)..(44): n is a, c, g, or t
  misc_feature (53)..(54): n is a, c, g, or t
tttttttaagcagtggtatcaacgcagagtacnntcggacaannggtaagctnntttttttttttttttttttttttttttttt

SEQ ID NO: 1125 - DNA, 84 bp, Artificial
  Barcode component
  misc_feature (33)..(34): n is a, c, g, or t
  misc_feature (43)..(44): n is a, c, g, or t
  misc_feature (53)..(54): n is a, c, g, or t
tttttttaagcagtggtatcaacgcagagtacnntcggacaanntgtgtcganntttttttttttttttttttttttttttttt

SEQ ID NO: 1126 - DNA, 84 bp, Artificial
  Barcode component
  misc_feature (33)..(34): n is a, c, g, or t
  misc_feature (43)..(44): n is a, c, g, or t
  misc_feature (53)..(54): n is a, c, g, or t
tttttttaagcagtggtatcaacgcagagtacnntcggacaanngagcatganntttttttttttttttttttttttttttttt

SEQ ID NO: 1127 - DNA, 84 bp, Artificial
  Barcode component
  misc_feature (33)..(34): n is a, c, g, or t
  misc_feature (43)..(44): n is a, c, g, or t
  misc_feature (53)..(54): n is a, c, g, or t
tttttttaagcagtggtatcaacgcagagtacnntcggacaanntcgaagtcnntttttttttttttttttttttttttttttt

SEQ ID NO: 1128 - DNA, 84 bp, Artificial
  Barcode component
  misc_feature (33)..(34): n is a, c, g, or t
  misc_feature (43)..(44): n is a, c, g, or t
  misc_feature (53)..(54): n is a, c, g, or t
tttttttaagcagtggtatcaacgcagagtacnntcggacaannggtgaacanntttttttttttttttttttttttttttttt

SEQ ID NO: 1129 - DNA, 84 bp, Artificial
  Barcode component
  misc_feature (33)..(34): n is a, c, g, or t
  misc_feature (43)..(44): n is a, c, g, or t
  misc_feature (53)..(54): n is a, c, g, or t
tttttttaagcagtggtatcaacgcagagtacnntcggacaannacatgcacnntttttttttttttttttttttttttttttt

SEQ ID NO: 1130 - DNA, 84 bp, Artificial
  Barcode component
  misc_feature (33)..(34): n is a, c, g, or t
  misc_feature (43)..(44): n is a, c, g, or t
  misc_feature (53)..(54): n is a, c, g, or t
tttttttaagcagtggtatcaacgcagagtacnntcggacaannccaacagtnntttttttttttttttttttttttttttttt

SEQ ID NO: 1131 - DNA, 84 bp, Artificial
  Barcode component
  misc_feature (33)..(34): n is a, c, g, or t
  misc_feature (43)..(44): n is a, c, g, or t
  misc_feature (53)..(54): n is a, c, g, or t
tttttttaagcagtggtatcaacgcagagtacnntcggacaannagaacagcnntttttttttttttttttttttttttttttt

SEQ ID NO: 1132 - DNA, 84 bp, Artificial
  Barcode component
  misc_feature (33)..(34): n is a, c, g, or t
  misc_feature (43)..(44): n is a, c, g, or t
  misc_feature (53)..(54): n is a, c, g, or t
tttttttaagcagtggtatcaacgcagagtacnntcggacaanngaacacgtnntttttttttttttttttttttttttttttt

SEQ ID NO: 1133 - DNA, 84 bp, Artificial
  Barcode component
  misc_feature (33)..(34): n is a, c, g, or t
  misc_feature (43)..(44): n is a, c, g, or t
  misc_feature (53)..(54): n is a, c, g, or t
tttttttaagcagtggtatcaacgcagagtacnntcggacaannggtcttcanntttttttttttttttttttttttttttttt

SEQ ID NO: 1134 - DNA, 84 bp, Artificial
  Barcode component
  misc_feature (33)..(34): n is a, c, g, or t
  misc_feature (43)..(44): n is a, c, g, or t
  misc_feature (53)..(54): n is a, c, g, or t
tttttttaagcagtggtatcaacgcagagtacnntcggacaannaggttcagnntttttttttttttttttttttttttttttt

SEQ ID NO: 1135 - DNA, 84 bp, Artificial
  Barcode component
  misc_feature (33)..(34): n is a, c, g, or t
  misc_feature (43)..(44): n is a, c, g, or t
  misc_feature (53)..(54): n is a, c, g, or t
tttttttaagcagtggtatcaacgcagagtacnntcggacaannctagagcanntttttttttttttttttttttttttttttt

SEQ ID NO: 1136 - DNA, 84 bp, Artificial
  Barcode component
  misc_feature (33)..(34): n is a, c, g, or t
  misc_feature (43)..(44): n is a, c, g, or t
  misc_feature (53)..(54): n is a, c, g, or t
tttttttaagcagtggtatcaacgcagagtacnntcggacaanncttctagcnntttttttttttttttttttttttttttttt

SEQ ID NO: 1137 - DNA, 84 bp, Artificial
  Barcode component
  misc_feature (33)..(34): n is a, c, g, or t
  misc_feature (43)..(44): n is a, c, g, or t
  misc_feature (53)..(54): n is a, c, g, or t
tttttttaagcagtggtatcaacgcagagtacnntcggacaanngagtaacgnntttttttttttttttttttttttttttttt

SEQ ID NO: 1138 - DNA, 84 bp, Artificial
  Barcode component
  misc_feature (33)..(34): n is a, c, g, or t
  misc_feature (43)..(44): n is a, c, g, or t
  misc_feature (53)..(54): n is a, c, g, or t
tttttttaagcagtggtatcaacgcagagtacnntcggacaannctaagaggnntttttttttttttttttttttttttttttt

SEQ ID NO: 1139 - DNA, 84 bp, Artificial
  Barcode component
  misc_feature (33)..(34): n is a, c, g, or t
  misc_feature (43)..(44): n is a, c, g, or t
  misc_feature (53)..(54): n is a, c, g, or t
tttttttaagcagtggtatcaacgcagagtacnntcggacaannacgtgtagnntttttttttttttttttttttttttttttt

SEQ ID NO: 1140 - DNA, 84 bp, Artificial
  Barcode component
  misc_feature (33)..(34): n is a, c, g, or t
  misc_feature (43)..(44): n is a, c, g, or t
  misc_feature (53)..(54): n is a, c, g, or t
tttttttaagcagtggtatcaacgcagagtacnntcggacaannactacaggnntttttttttttttttttttttttttttttt

SEQ ID NO: 1141 - DNA, 84 bp, Artificial
  Barcode component
  misc_feature (33)..(34): n is a, c, g, or t
  misc_feature (43)..(44): n is a, c, g, or t
  misc_feature (53)..(54): n is a, c, g, or t
tttttttaagcagtggtatcaacgcagagtacnntcggacaanntacaggtcnntttttttttttttttttttttttttttttt

SEQ ID NO: 1142 - DNA, 84 bp, Artificial
  Barcode component
  misc_feature (33)..(34): n is a, c, g, or t
  misc_feature (43)..(44): n is a, c, g, or t
  misc_feature (53)..(54): n is a, c, g, or t
tttttttaagcagtggtatcaacgcagagtacnntcggacaannctcacatgnntttttttttttttttttttttttttttttt

SEQ ID NO: 1143 - DNA, 84 bp, Artificial
  Barcode component
  misc_feature (33)..(34): n is a, c, g, or t
  misc_feature (43)..(44): n is a, c, g, or t
  misc_feature (53)..(54): n is a, c, g, or t
tttttttaagcagtggtatcaacgcagagtacnntcggacaannactaggagnntttttttttttttttttttttttttttttt

SEQ ID NO: 1144 - DNA, 84 bp, Artificial
  Barcode component
  misc_feature (33)..(34): n is a, c, g, or t
  misc_feature (43)..(44): n is a, c, g, or t
  misc_feature (53)..(54): n is a, c, g, or t
tttttttaagcagtggtatcaacgcagagtacnntcggacaannccatagganntttttttttttttttttttttttttttttt

SEQ ID NO: 1145 - DNA, 84 bp, Artificial
  Barcode component
  misc_feature (33)..(34): n is a, c, g, or t
  misc_feature (43)..(44): n is a, c, g, or t
  misc_feature (53)..(54): n is a, c, g, or t
tttttttaagcagtggtatcaacgcagagtacnntcggacaannggagaatcnntttttttttttttttttttttttttttttt

SEQ ID NO: 1146 - DNA, 84 bp, Artificial
  Barcode component
  misc_feature (33)..(34): n is a, c, g, or t
  misc_feature (43)..(44): n is a, c, g, or t
  misc_feature (53)..(54): n is a, c, g, or t
tttttttaagcagtggtatcaacgcagagtacnntcggacaanngccaagaanntttttttttttttttttttttttttttttt

SEQ ID NO: 1147 - DNA, 84 bp, Artificial
  Barcode component
  misc_feature (33)..(34): n is a, c, g, or t
  misc_feature (43)..(44): n is a, c, g, or t
  misc_feature (53)..(54): n is a, c, g, or t
tttttttaagcagtggtatcaacgcagagtacnntcggacaannaaggcaagnntttttttttttttttttttttttttttttt

SEQ ID NO: 1148 - DNA, 84 bp, Artificial
  Barcode component
  misc_feature (33)..(34): n is a, c, g, or t
  misc_feature (43)..(44): n is a, c, g, or t
  misc_feature (53)..(54): n is a, c, g, or t
tttttttaagcagtggtatcaacgcagagtacnntcggacaannaatgtcgcnntttttttttttttttttttttttttttttt

SEQ ID NO: 1149 - DNA, 84 bp, Artificial
  Barcode component
  misc_feature (33)..(34): n is a, c, g, or t
  misc_feature (43)..(44): n is a, c, g, or t
  misc_feature (53)..(54): n is a, c, g, or t
tttttttaagcagtggtatcaacgcagagtacnntcggacaannatggaaccnntttttttttttttttttttttttttttttt

SEQ ID NO: 1150 - DNA, 84 bp, Artificial
  Barcode component
  misc_feature (33)..(34): n is a, c, g, or t
  misc_feature (43)..(44): n is a, c, g, or t
  misc_feature (53)..(54): n is a, c, g, or t
tttttttaagcagtggtatcaacgcagagtacnntcggacaannagaggcatnntttttttttttttttttttttttttttttt

SEQ ID NO: 1151 - DNA, 84 bp, Artificial
  Barcode component
  misc_feature (33)..(34): n is a, c, g, or t
  misc_feature (43)..(44): n is a, c, g, or t
  misc_feature (53)..(54): n is a, c, g, or t
tttttttaagcagtggtatcaacgcagagtacnntcggacaanntgcatagcnntttttttttttttttttttttttttttttt

SEQ ID NO: 1152 - DNA, 84 bp, Artificial
  Barcode component
  misc_feature (33)..(34): n is a, c, g, or t
  misc_feature (43)..(44): n is a, c, g, or t
  misc_feature (53)..(54): n is a, c, g, or t
tttttttaagcagtggtatcaacgcagagtacnntcggacaannctaacgganntttttttttttttttttttttttttttttt

SEQ ID NO: 1153 - DNA, 84 bp, Artificial
  Barcode component
  misc_feature (33)..(34): n is a, c, g, or t
  misc_feature (43)..(44): n is a, c, g, or t
  misc_feature (53)..(54): n is a, c, g, or t
tttttttaagcagtggtatcaacgcagagtacnntcggacaanntatcgaggnntttttttttttttttttttttttttttttt

SEQ ID NO: 1154 - DNA, 84 bp, Artificial
  Barcode component
  misc_feature (33)..(34): n is a, c, g, or t
  misc_feature (43)..(44): n is a, c, g, or t
  misc_feature (53)..(54): n is a, c, g, or t
tttttttaagcagtggtatcaacgcagagtacnntcggacaanncatagcctnntttttttttttttttttttttttttttttt

SEQ ID NO: 1155 - DNA, 84 bp, Artificial
  Barcode component
  misc_feature (33)..(34): n is a, c, g, or t
  misc_feature (43)..(44): n is a, c, g, or t
  misc_feature (53)..(54): n is a, c, g, or t
tttttttaagcagtggtatcaacgcagagtacnntcggacaannatcgagacnntttttttttttttttttttttttttttttt

SEQ ID NO: 1156 - DNA, 84 bp, Artificial
  Barcode component
  misc_feature (33)..(34): n is a, c, g, or t
  misc_feature (43)..(44): n is a, c, g, or t
  misc_feature (53)..(54): n is a, c, g, or t
tttttttaagcagtggtatcaacgcagagtacnntcggacaannggaagagtnntttttttttttttttttttttttttttttt

SEQ ID NO: 1157 - DNA, 84 bp, Artificial
  Barcode component
  misc_feature (33)..(34): n is a, c, g, or t
  misc_feature (43)..(44): n is a, c, g, or t
  misc_feature (53)..(54): n is a, c, g, or t
tttttttaagcagtggtatcaacgcagagtacnntcggacaannccaagtagnntttttttttttttttttttttttttttttt

SEQ ID NO: 1158 - DNA, 84 bp, Artificial
  Barcode component
  misc_feature (33)..(34): n is a, c, g, or t
  misc_feature (43)..(44): n is a, c, g, or t
  misc_feature (53)..(54): n is a, c, g, or t
tttttttaagcagtggtatcaacgcagagtacnntcggacaannctgaacagnntttttttttttttttttttttttttttttt

SEQ ID NO: 1159 - DNA, 84 bp, Artificial
  Barcode component
  misc_feature (33)..(34): n is a, c, g, or t
  misc_feature (43)..(44): n is a, c, g, or t
  misc_feature (53)..(54): n is a, c, g, or t
tttttttaagcagtggtatcaacgcagagtacnntcggacaanngtaggttcnntttttttttttttttttttttttttttttt

SEQ ID NO: 1160 - DNA, 84 bp, Artificial
  Barcode component
  misc_feature (33)..(34): n is a, c, g, or t
  misc_feature (43)..(44): n is a, c, g, or t
  misc_feature (53)..(54): n is a, c, g, or t
tttttttaagcagtggtatcaacgcagagtacnntcggacaanngtatggacnntttttttttttttttttttttttttttttt

SEQ ID NO: 1161 - DNA, 84 bp, Artificial
  Barcode component
  misc_feature (33)..(34): n is a, c, g, or t
  misc_feature (43)..(44): n is a, c, g, or t
  misc_feature (53)..(54): n is a, c, g, or t
tttttttaagcagtggtatcaacgcagagtacnntcggacaanntcgcaacanntttttttttttttttttttttttttttttt

SEQ ID NO: 1162 - DNA, 84 bp, Artificial
  Barcode component
  misc_feature (33)..(34): n is a, c, g, or t
  misc_feature (43)..(44): n is a, c, g, or t
  misc_feature (53)..(54): n is a, c, g, or t
tttttttaagcagtggtatcaacgcagagtacnntcggacaannccgctaatnntttttttttttttttttttttttttttttt

SEQ ID NO: 1163 - DNA, 84 bp, Artificial
  Barcode component
  misc_feature (33)..(34): n is a, c, g, or t
  misc_feature (43)..(44): n is a, c, g, or t
  misc_feature (53)..(54): n is a, c, g, or t
tttttttaagcagtggtatcaacgcagagtacnntcggacaanngattcgcanntttttttttttttttttttttttttttttt

SEQ ID NO: 1164 - DNA, 84 bp, Artificial
  Barcode component
  misc_feature (33)..(34): n is a, c, g, or t
  misc_feature (43)..(44): n is a, c, g, or t
  misc_feature (53)..(54): n is a, c, g, or t
tttttttaagcagtggtatcaacgcagagtacnntcggacaanncgatggaanntttttttttttttttttttttttttttttt

SEQ ID NO: 1165 - DNA, 84 bp, Artificial
  Barcode component
  misc_feature (33)..(34): n is a, c, g, or t
  misc_feature (43)..(44): n is a, c, g, or t
  misc_feature (53)..(54): n is a, c, g, or t
tttttttaagcagtggtatcaacgcagagtacnntcggacaannagcaagganntttttttttttttttttttttttttttttt

SEQ ID NO: 1166 - DNA, 84 bp, Artificial
  Barcode component
  misc_feature (33)..(34): n is a, c, g, or t
  misc_feature (43)..(44): n is a, c, g, or t
  misc_feature (53)..(54): n is a, c, g, or t
tttttttaagcagtggtatcaacgcagagtacnntcggacaanncgtagcaanntttttttttttttttttttttttttttttt

SEQ ID NO: 1167 - DNA, 84 bp, Artificial
  Barcode component
  misc_feature (33)..(34): n is a, c, g, or t
  misc_feature (43)..(44): n is a, c, g, or t
  misc_feature (53)..(54): n is a, c, g, or t
tttttttaagcagtggtatcaacgcagagtacnntcggacaanntggcagtanntttttttttttttttttttttttttttttt

SEQ ID NO: 1168 - DNA, 84 bp, Artificial
  Barcode component
  misc_feature (33)..(34): n is a, c, g, or t
  misc_feature (43)..(44): n is a, c, g, or t
  misc_feature (53)..(54): n is a, c, g, or t
tttttttaagcagtggtatcaacgcagagtacnntcggacaanncggtagttnntttttttttttttttttttttttttttttt

SEQ ID NO: 1169 - DNA, 84 bp, Artificial
  Barcode component
  misc_feature (33)..(34): n is a, c, g, or t
  misc_feature (43)..(44): n is a, c, g, or t
  misc_feature (53)..(54): n is a, c, g, or t
tttttttaagcagtggtatcaacgcagagtacnntcggacaanntgacttcgnntttttttttttttttttttttttttttttt

SEQ ID NO: 1170 - DNA, 84 bp, Artificial
  Barcode component
  misc_feature (33)..(34): n is a, c, g, or t
  misc_feature (43)..(44): n is a, c, g, or t
  misc_feature (53)..(54): n is a, c, g, or t
tttttttaagcagtggtatcaacgcagagtacnntcggacaanngagtgcaanntttttttttttttttttttttttttttttt

SEQ ID NO: 1171 - DNA, 84 bp, Artificial
  Barcode component
  misc_feature (33)..(34): n is a, c, g, or t
  misc_feature (43)..(44): n is a, c, g, or t
  misc_feature (53)..(54): n is a, c, g, or t
tttttttaagcagtggtatcaacgcagagtacnntcggacaannacggtaacnntttttttttttttttttttttttttttttt

SEQ ID NO: 1172 - DNA, 84 bp, Artificial
  Barcode component
  misc_feature (33)..(34): n is a, c, g, or t
  misc_feature (43)..(44): n is a, c, g, or t
  misc_feature (53)..(54): n is a, c, g, or t
tttttttaagcagtggtatcaacgcagagtacnntcggacaannaagtggtgnntttttttttttttttttttttttttttttt

SEQ ID NO: 1173 - DNA, 84 bp, Artificial
  Barcode component
  misc_feature (33)..(34): n is a, c, g, or t
  misc_feature (43)..(44): n is a, c, g, or t
  misc_feature (53)..(54): n is a, c, g, or t
tttttttaagcagtggtatcaacgcagagtacnntcggacaannggagacaanntttttttttttttttttttttttttttttt

SEQ ID NO: 1174 - DNA, 84 bp, Artificial
  Barcode component
  misc_feature (33)..(34): n is a, c, g, or t
  misc_feature (43)..(44): n is a, c, g, or t
  misc_feature (53)..(54): n is a, c, g, or t
tttttttaagcagtggtatcaacgcagagtacnntcggacaanntcaaggacnntttttttttttttttttttttttttttttt

SEQ ID NO: 1175 - DNA, 84 bp, Artificial
  Barcode component
  misc_feature (33)..(34): n is a, c, g, or t
  misc_feature (43)..(44): n is a, c, g, or t
  misc_feature (53)..(54): n is a, c, g, or t
tttttttaagcagtggtatcaacgcagagtacnntcggacaannaagagagcnntttttttttttttttttttttttttttttt

SEQ ID NO: 1176 - DNA, 84 bp, Artificial
  Barcode component
  misc_feature (33)..(34): n is a, c, g, or t
  misc_feature (43)..(44): n is a, c, g, or t
  misc_feature (53)..(54): n is a, c, g, or t
tttttttaagcagtggtatcaacgcagagtacnntcggacaanncgagagatnntttttttttttttttttttttttttttttt

SEQ ID NO: 1177 - DNA, 84 bp, Artificial
  Barcode component
  misc_feature (33)..(34): n is a, c, g, or t
  misc_feature (43)..(44): n is a, c, g, or t
  misc_feature (53)..(54): n is a, c, g, or t
tttttttaagcagtggtatcaacgcagagtacnntcggacaannacagatggnntttttttttttttttttttttttttttttt

SEQ ID NO: 1178 - DNA, 84 bp, Artificial
  Barcode component
  misc_feature (33)..(34): n is a, c, g, or t
  misc_feature (43)..(44): n is a, c, g, or t
  misc_feature (53)..(54): n is a, c, g, or t
tttttttaagcagtggtatcaacgcagagtacnntcggacaannaggagtcanntttttttttttttttttttttttttttttt

SEQ ID NO: 1179 - DNA, 84 bp, Artificial
  Barcode component
  misc_feature (33)..(34): n is a, c, g, or t
  misc_feature (43)..(44): n is a, c, g, or t
  misc_feature (53)..(54): n is a, c, g, or t
tttttttaagcagtggtatcaacgcagagtacnntcggacaanncgtgttacnntttttttttttttttttttttttttttttt

SEQ ID NO: 1180 - DNA, 84 bp, Artificial
  Barcode component
  misc_feature (33)..(34): n is a, c, g, or t
  misc_feature (43)..(44): n is a, c, g, or t
  misc_feature (53)..(54): n is a, c, g, or t
tttttttaagcagtggtatcaacgcagagtacnntcggacaanntagtgtgcnntttttttttttttttttttttttttttttt

SEQ ID NO: 1181 - DNA, 84 bp, Artificial
  Barcode component
  misc_feature (33)..(34): n is a, c, g, or t
  misc_feature (43)..(44): n is a, c, g, or t
  misc_feature (53)..(54): n is a, c, g, or t
tttttttaagcagtggtatcaacgcagagtacnntcggacaannctcatgacnntttttttttttttttttttttttttttttt

SEQ ID NO: 1182 - DNA, 84 bp, Artificial
  Barcode component
  misc_feature (33)..(34): n is a, c, g, or t
  misc_feature (43)..(44): n is a, c, g, or t
  misc_feature (53)..(54): n is a, c, g, or t
tttttttaagcagtggtatcaacgcagagtacnntcggacaanngtatccagnntttttttttttttttttttttttttttttt

SEQ ID NO: 1183 - DNA, 84 bp, Artificial
  Barcode component
  misc_feature (33)..(34): n is a, c, g, or t
  misc_feature (43)..(44): n is a, c, g, or t
  misc_feature (53)..(54): n is a, c, g, or t
tttttttaagcagtggtatcaacgcagagtacnntcggacaannacgcctatnntttttttttttttttttttttttttttttt

SEQ ID NO: 1184 - DNA, 84 bp, Artificial
  Barcode component
  misc_feature (33)..(34): n is a, c, g, or t
  misc_feature (43)..(44): n is a, c, g, or t
  misc_feature (53)..(54): n is a, c, g, or t
tttttttaagcagtggtatcaacgcagagtacnntcggacaannaacgacctnntttttttttttttttttttttttttttttt

SEQ ID NO: 1185 - DNA, 84 bp, Artificial
  Barcode component
  misc_feature (33)..(34): n is a, c, g, or t
  misc_feature (43)..(44): n is a, c, g, or t
  misc_feature (53)..(54): n is a, c, g, or t
tttttttaagcagtggtatcaacgcagagtacnntcggacaannatcaggctnntttttttttttttttttttttttttttttt

SEQ ID NO: 1186 - DNA, 84 bp, Artificial
  Barcode component
  misc_feature (33)..(34): n is a, c, g, or t
  misc_feature (43)..(44): n is a, c, g, or t
  misc_feature (53)..(54): n is a, c, g, or t
tttttttaagcagtggtatcaacgcagagtacnntcggacaanncaagttcgnntttttttttttttttttttttttttttttt

SEQ ID NO: 1187 - DNA, 84 bp, Artificial
  Barcode component
  misc_feature (33)..(34): n is a, c, g, or t
  misc_feature (43)..(44): n is a, c, g, or t
  misc_feature (53)..(54): n is a, c, g, or t
tttttttaagcagtggtatcaacgcagagtacnntcggacaanntagccaganntttttttttttttttttttttttttttttt

SEQ ID NO: 1188 - DNA, 84 bp, Artificial
  Barcode component
  misc_feature (33)..(34): n is a, c, g, or t
  misc_feature (43)..(44): n is a, c, g, or t
  misc_feature (53)..(54): n is a, c, g, or t
tttttttaagcagtggtatcaacgcagagtacnntcggacaanncaatcacgnntttttttttttttttttttttttttttttt

SEQ ID NO: 1189 - DNA, 84 bp, Artificial
  Barcode component
  misc_feature (33)..(34): n is a, c, g, or t
  misc_feature (43)..(44): n is a, c, g, or t
  misc_feature (53)..(54): n is a, c, g, or t
tttttttaagcagtggtatcaacgcagagtacnntcggacaanngcaacaagnntttttttttttttttttttttttttttttt

SEQ ID NO: 1190 - DNA, 84 bp, Artificial
  Barcode component
  misc_feature (33)..(34): n is a, c, g, or t
  misc_feature (43)..(44): n is a, c, g, or t
  misc_feature (53)..(54): n is a, c, g, or t
tttttttaagcagtggtatcaacgcagagtacnntcggacaanncacgacaanntttttttttttttttttttttttttttttt

SEQ ID NO: 1191 - DNA, 84 bp, Artificial
  Barcode component
  misc_feature (33)..(34): n is a, c, g, or t
  misc_feature (43)..(44): n is a, c, g, or t
  misc_feature (53)..(54): n is a, c, g, or t
tttttttaagcagtggtatcaacgcagagtacnntcggacaanntacggaganntttttttttttttttttttttttttttttt

SEQ ID NO: 1192 - DNA, 84 bp, Artificial
  Barcode component
  misc_feature (33)..(34): n is a, c, g, or t
  misc_feature (43)..(44): n is a, c, g, or t
  misc_feature (53)..(54): n is a, c, g, or t
tttttttaagcagtggtatcaacgcagagtacnntcggacaanncgacaaganntttttttttttttttttttttttttttttt

SEQ ID NO: 1193 - DNA, 84 bp, Artificial
  Barcode component
  misc_feature (33)..(34): n is a, c, g, or t
  misc_feature (43)..(44): n is a, c, g, or t
  misc_feature (53)..(54): n is a, c, g, or t
tttttttaagcagtggtatcaacgcagagtacnntcggacaanncgaagtganntttttttttttttttttttttttttttttt

SEQ ID NO: 1194 - DNA, 84 bp, Artificial
  Barcode component
  misc_feature (33)..(34): n is a, c, g, or t
  misc_feature (43)..(44): n is a, c, g, or t
  misc_feature (53)..(54): n is a, c, g, or t
tttttttaagcagtggtatcaacgcagagtacnntcggacaannagctggtanntttttttttttttttttttttttttttttt

SEQ ID NO: 1195 - DNA, 84 bp, Artificial
  Barcode component
  misc_feature (33)..(34): n is a, c, g, or t
  misc_feature (43)..(44): n is a, c, g, or t
  misc_feature (53)..(54): n is a, c, g, or t
tttttttaagcagtggtatcaacgcagagtacnntcggacaannaactaggcnntttttttttttttttttttttttttttttt

SEQ ID NO: 1196 - DNA, 84 bp, Artificial
  Barcode component
  misc_feature (33)..(34): n is a, c, g, or t
  misc_feature (43)..(44): n is a, c, g, or t
  misc_feature (53)..(54): n is a, c, g, or t
tttttttaagcagtggtatcaacgcagagtacnntcggacaanncagcaagtnntttttttttttttttttttttttttttttt

SEQ ID NO: 1197 - DNA, 84 bp, Artificial
  Barcode component
  misc_feature (33)..(34): n is a, c, g, or t
  misc_feature (43)..(44): n is a, c, g, or t
  misc_feature (53)..(54): n is a, c, g, or t
tttttttaagcagtggtatcaacgcagagtacnntcggacaannacgaggtanntttttttttttttttttttttttttttttt

SEQ ID NO: 1198 - DNA, 84 bp, Artificial
  Barcode component
  misc_feature (33)..(34): n is a, c, g, or t
  misc_feature (43)..(44): n is a, c, g, or t
  misc_feature (53)..(54): n is a, c, g, or t
tttttttaagcagtggtatcaacgcagagtacnntcggacaanncatcttccnntttttttttttttttttttttttttttttt

SEQ ID NO: 1199 - DNA, 84 bp, Artificial
  Barcode component
  misc_feature (33)..(34): n is a, c, g, or t
  misc_feature (43)..(44): n is a, c, g, or t
  misc_feature (53)..(54): n is a, c, g, or t
tttttttaagcagtggtatcaacgcagagtacnntcggacaanncctgaatcnntttttttttttttttttttttttttttttt

SEQ ID NO: 1200 - DNA, 84 bp, Artificial
  Barcode component
  misc_feature (33)..(34): n is a, c, g, or t
  misc_feature (43)..(44): n is a, c, g, or t
  misc_feature (53)..(54): n is a, c, g, or t
tttttttaagcagtggtatcaacgcagagtacnntcggacaanntgcagactnntttttttttttttttttttttttttttttt

SEQ ID NO: 1201 - DNA, 84 bp, Artificial
  Barcode component
  misc_feature (33)..(34): n is a, c, g, or t
  misc_feature (43)..(44): n is a, c, g, or t
  misc_feature (53)..(54): n is a, c, g, or t
tttttttaagcagtggtatcaacgcagagtacnntcggacaannagatgtggnntttttttttttttttttttttttttttttt

SEQ ID NO: 1202 - DNA, 84 bp, Artificial
  Barcode component
  misc_feature (33)..(34): n is a, c, g, or t
  misc_feature (43)..(44): n is a, c, g, or t
  misc_feature (53)..(54): n is a, c, g, or t
tttttttaagcagtggtatcaacgcagagtacnntcggacaannagttcgacnntttttttttttttttttttttttttttttt

SEQ ID NO: 1203 - DNA, 84 bp, Artificial
  Barcode component
  misc_feature (33)..(34): n is a, c, g, or t
  misc_feature (43)..(44): n is a, c, g, or t
  misc_feature (53)..(54): n is a, c, g, or t
tttttttaagcagtggtatcaacgcagagtacnntcggacaannacaacctcnntttttttttttttttttttttttttttttt

SEQ ID NO: 1204 - DNA, 84 bp, Artificial
  Barcode component
  misc_feature (33)..(34): n is a, c, g, or t
  misc_feature (43)..(44): n is a, c, g, or t
  misc_feature (53)..(54): n is a, c, g, or t
tttttttaagcagtggtatcaacgcagagtacnntcggacaanncatggtagnntttttttttttttttttttttttttttttt

SEQ ID NO: 1205 - DNA, 84 bp, Artificial
  Barcode component
  misc_feature (33)..(34): n is a, c, g, or t
  misc_feature (43)..(44): n is a, c, g, or t
  misc_feature (53)..(54): n is a, c, g, or t
tttttttaagcagtggtatcaacgcagagtacnntcggacaanncgtatctcnntttttttttttttttttttttttttttttt

SEQ ID NO: 1206 - DNA, 84 bp, Artificial
  Barcode component
  misc_feature (33)..(34): n is a, c, g, or t
  misc_feature (43)..(44): n is a, c, g, or t
  misc_feature (53)..(54): n is a, c, g, or t
tttttttaagcagtggtatcaacgcagagtacnntcggacaanncctagttcnntttttttttttttttttttttttttttttt

SEQ ID NO: 1207 - DNA, 84 bp, Artificial
  Barcode component
  misc_feature (33)..(34): n is a, c, g, or t
  misc_feature (43)..(44): n is a, c, g, or t
  misc_feature (53)..(54): n is a, c, g, or t
tttttttaagcagtggtatcaacgcagagtacnntcggacaanncaagagtcnntttttttttttttttttttttttttttttt

SEQ ID NO: 1208 - DNA, 84 bp, Artificial
  Barcode component
  misc_feature (33)..(34): n is a, c, g, or t
  misc_feature (43)..(44): n is a, c, g, or t
  misc_feature (53)..(54): n is a, c, g, or t
tttttttaagcagtggtatcaacgcagagtacnnattgtccgnnaatcggcanntttttttttttttttttttttttttttttt

SEQ ID NO: 1209 - DNA, 84 bp, Artificial
  Barcode component
  misc_feature (33)..(34): n is a, c, g, or t
  misc_feature (43)..(44): n is a, c, g, or t
  misc_feature (53)..(54): n is a, c, g, or t
tttttttaagcagtggtatcaacgcagagtacnnattgtccgnntacggcatnntttttttttttttttttttttttttttttt

SEQ ID NO: 1210 - DNA, 84 bp, Artificial
  Barcode component
  misc_feature (33)..(34): n is a, c, g, or t
  misc_feature (43)..(44): n is a, c, g, or t
  misc_feature (53)..(54): n is a, c, g, or t
tttttttaagcagtggtatcaacgcagagtacnnattgtccgnnttggatcgnntttttttttttttttttttttttttttttt

SEQ ID NO: 1211 - DNA, 84 bp, Artificial
  Barcode component
  misc_feature (33)..(34): n is a, c, g, or t
  misc_feature (43)..(44): n is a, c, g, or t
  misc_feature (53)..(54): n is a, c, g, or t
tttttttaagcagtggtatcaacgcagagtacnnattgtccgnntggaacganntttttttttttttttttttttttttttttt

SEQ ID NO: 1212 - DNA, 84 bp, Artificial
  Barcode component
  misc_feature (33)..(34): n is a, c, g, or t
  misc_feature (43)..(44): n is a, c, g, or t
  misc_feature (53)..(54): n is a, c, g, or t
tttttttaagcagtggtatcaacgcagagtacnnattgtccgnnggcaatcanntttttttttttttttttttttttttttttt

SEQ ID NO: 1213 - DNA, 84 bp, Artificial
  Barcode component
  misc_feature (33)..(34): n is a, c, g, or t
  misc_feature (43)..(44): n is a, c, g, or t
  misc_feature (53)..(54): n is a, c, g, or t
tttttttaagcagtggtatcaacgcagagtacnnattgtccgnngaatccganntttttttttttttttttttttttttttttt

SEQ ID NO: 1214 - DNA, 84 bp, Artificial
  Barcode component
  misc_feature (33)..(34): n is a, c, g, or t
  misc_feature (43)..(44): n is a, c, g, or t
  misc_feature (53)..(54): n is a, c, g, or t
tttttttaagcagtggtatcaacgcagagtacnnattgtccgnnttacggtgnntttttttttttttttttttttttttttttt

SEQ ID NO: 1215 - DNA, 84 bp, Artificial
  Barcode component
  misc_feature (33)..(34): n is a, c, g, or t
  misc_feature (43)..(44): n is a, c, g, or t
  misc_feature (53)..(54): n is a, c, g, or t
tttttttaagcagtggtatcaacgcagagtacnnattgtccgnncatatcggnntttttttttttttttttttttttttttttt

SEQ ID NO: 1216 - DNA, 84 bp, Artificial
  Barcode component
  misc_feature (33)..(34): n is a, c, g, or t
  misc_feature (43)..(44): n is a, c, g, or t
  misc_feature (53)..(54): n is a, c, g, or t
tttttttaagcagtggtatcaacgcagagtacnnattgtccgnncttcggtanntttttttttttttttttttttttttttttt

SEQ ID NO: 1217 - DNA, 84 bp, Artificial
  Barcode component
  misc_feature (33)..(34): n is a, c, g, or t
  misc_feature (43)..(44): n is a, c, g, or t
  misc_feature (53)..(54): n is a, c, g, or t
tttttttaagcagtggtatcaacgcagagtacnnattgtccgnntcctaacgnntttttttttttttttttttttttttttttt

SEQ ID NO: 1218 - DNA, 84 bp, Artificial
  Barcode component
  misc_feature (33)..(34): n is a, c, g, or t
  misc_feature (43)..(44): n is a, c, g, or t
  misc_feature (53)..(54): n is a, c, g, or t
tttttttaagcagtggtatcaacgcagagtacnnattgtccgnngtaagccanntttttttttttttttttttttttttttttt

SEQ ID NO: 1219 - DNA, 84 bp, Artificial
  Barcode component
  misc_feature (33)..(34): n is a, c, g, or t
  misc_feature (43)..(44): n is a, c, g, or t
  misc_feature (53)..(54): n is a, c, g, or t
tttttttaagcagtggtatcaacgcagagtacnnattgtccgnntaaggtggnntttttttttttttttttttttttttttttt

SEQ ID NO: 1220 - DNA, 84 bp, Artificial
  Barcode component
  misc_feature (33)..(34): n is a, c, g, or t
  misc_feature (43)..(44): n is a, c, g, or t
  misc_feature (53)..(54): n is a, c, g, or t
tttttttaagcagtggtatcaacgcagagtacnnattgtccgnnggtaagctnntttttttttttttttttttttttttttttt

SEQ ID NO: 1221 - DNA, 84 bp, Artificial
  Barcode component
  misc_feature (33)..(34): n is a, c, g, or t
  misc_feature (43)..(44): n is a, c, g, or t
  misc_feature (53)..(54): n is a, c, g, or t
tttttttaagcagtggtatcaacgcagagtacnnattgtccgnntgtgtcganntttttttttttttttttttttttttttttt

SEQ ID NO: 1222 - DNA, 84 bp, Artificial
  Barcode component
  misc_feature (33)..(34): n is a, c, g, or t
  misc_feature (43)..(44): n is a, c, g, or t
  misc_feature (53)..(54): n is a, c, g, or t
tttttttaagcagtggtatcaacgcagagtacnnattgtccgnngagcatganntttttttttttttttttttttttttttttt

SEQ ID NO: 1223 - DNA, 84 bp, Artificial
  Barcode component
  misc_feature (33)..(34): n is a, c, g, or t
  misc_feature (43)..(44): n is a, c, g, or t
  misc_feature (53)..(54): n is a, c, g, or t
tttttttaagcagtggtatcaacgcagagtacnnattgtccgnntcgaagtcnntttttttttttttttttttttttttttttt

SEQ ID NO: 1224 - DNA, 84 bp, Artificial
  Barcode component
  misc_feature (33)..(34): n is a, c, g, or t
  misc_feature (43)..(44): n is a, c, g, or t
  misc_feature (53)..(54): n is a, c, g, or t
tttttttaagcagtggtatcaacgcagagtacnnattgtccgnnggtgaacanntttttttttttttttttttttttttttttt

SEQ ID NO: 1225 - DNA, 84 bp, Artificial
  Barcode component
  misc_feature (33)..(34): n is a, c, g, or t
  misc_feature (43)..(44): n is a, c, g, or t
  misc_feature (53)..(54): n is a, c, g, or t
tttttttaagcagtggtatcaacgcagagtacnnattgtccgnnacatgcacnntttttttttttttttttttttttttttttt

SEQ ID NO: 1226 - DNA, 84 bp, Artificial
  Barcode component
  misc_feature (33)..(34): n is a, c, g, or t
  misc_feature (43)..(44): n is a, c, g, or t
  misc_feature (53)..(54): n is a, c, g, or t
tttttttaagcagtggtatcaacgcagagtacnnattgtccgnnccaacagtnntttttttttttttttttttttttttttttt

SEQ ID NO: 1227 - DNA, 84 bp, Artificial
  Barcode component
  misc_feature (33)..(34): n is a, c, g, or t
  misc_feature (43)..(44): n is a, c, g, or t
  misc_feature (53)..(54): n is a, c, g, or t
tttttttaagcagtggtatcaacgcagagtacnnattgtccgnnagaacagcnntttttttttttttttttttttttttttttt

SEQ ID NO: 1228 - DNA, 84 bp, Artificial
  Barcode component
  misc_feature (33)..(34): n is a, c, g, or t
  misc_feature (43)..(44): n is a, c, g, or t
  misc_feature (53)..(54): n is a, c, g, or t
tttttttaagcagtggtatcaacgcagagtacnnattgtccgnngaacacgtnntttttttttttttttttttttttttttttt

SEQ ID NO: 1229 - DNA, 84 bp, Artificial
  Barcode component
  misc_feature (33)..(34): n is a, c, g, or t
  misc_feature (43)..(44): n is a, c, g, or t
  misc_feature (53)..(54): n is a, c, g, or t
tttttttaagcagtggtatcaacgcagagtacnnattgtccgnnggtcttcanntttttttttttttttttttttttttttttt

SEQ ID NO: 1230 - DNA, 84 bp, Artificial
  Barcode component
  misc_feature (33)..(34): n is a, c, g, or t
  misc_feature (43)..(44): n is a, c, g, or t
  misc_feature (53)..(54): n is a, c, g, or t
tttttttaagcagtggtatcaacgcagagtacnnattgtccgnnaggttcagnntttttttttttttttttttttttttttttt

SEQ ID NO: 1231 - DNA, 84 bp, Artificial
  Barcode component
  misc_feature (33)..(34): n is a, c, g, or t
  misc_feature (43)..(44): n is a, c, g, or t
  misc_feature (53)..(54): n is a, c, g, or t
tttttttaagcagtggtatcaacgcagagtacnnattgtccgnnctagagcanntttttttttttttttttttttttttttttt

SEQ ID NO: 1232 - DNA, 84 bp, Artificial
  Barcode component
  misc_feature (33)..(34): n is a, c, g, or t
  misc_feature (43)..(44): n is a, c, g, or t
  misc_feature (53)..(54): n is a, c, g, or t
tttttttaagcagtggtatcaacgcagagtacnnattgtccgnncttctagcnntttttttttttttttttttttttttttttt

SEQ ID NO: 1233 - DNA, 84 bp, Artificial
  Barcode component
  misc_feature (33)..(34): n is a, c, g, or t
  misc_feature (43)..(44): n is a, c, g, or t
  misc_feature (53)..(54): n is a, c, g, or t
tttttttaagcagtggtatcaacgcagagtacnnattgtccgnngagtaacgnntttttttttttttttttttttttttttttt

SEQ ID NO: 1234 - DNA, 84 bp, Artificial
  Barcode component
  misc_feature (33)..(34): n is a, c, g, or t
  misc_feature (43)..(44): n is a, c, g, or t
  misc_feature (53)..(54): n is a, c, g, or t
tttttttaagcagtggtatcaacgcagagtacnnattgtccgnnctaagaggnntttttttttttttttttttttttttttttt

SEQ ID NO: 1235 - DNA, 84 bp, Artificial
  Barcode component
  misc_feature (33)..(34): n is a, c, g, or t
  misc_feature (43)..(44): n is a, c, g, or t
  misc_feature (53)..(54): n is a, c, g, or t
tttttttaagcagtggtatcaacgcagagtacnnattgtccgnnacgtgtagnntttttttttttttttttttttttttttttt

SEQ ID NO: 1236 - DNA, 84 bp, Artificial
  Barcode component
  misc_feature (33)..(34): n is a, c, g, or t
  misc_feature (43)..(44): n is a, c, g, or t
  misc_feature (53)..(54): n is a, c, g, or t
tttttttaagcagtggtatcaacgcagagtacnnattgtccgnnactacaggnntttttttttttttttttttttttttttttt

SEQ ID NO: 1237 - DNA, 84 bp, Artificial
  Barcode component
  misc_feature (33)..(34): n is a, c, g, or t
  misc_feature (43)..(44): n is a, c, g, or t
  misc_feature (53)..(54): n is a, c, g, or t
tttttttaagcagtggtatcaacgcagagtacnnattgtccgnntacaggtcnntttttttttttttttttttttttttttttt

SEQ ID NO: 1238 - DNA, 84 bp, Artificial
  Barcode component
  misc_feature (33)..(34): n is a, c, g, or t
  misc_feature (43)..(44): n is a, c, g, or t
  misc_feature (53)..(54): n is a, c, g, or t
tttttttaagcagtggtatcaacgcagagtacnnattgtccgnnctcacatgnntttttttttttttttttttttttttttttt

SEQ ID NO: 1239 - DNA, 84 bp, Artificial
  Barcode component
  misc_feature (33)..(34): n is a, c, g, or t
  misc_feature (43)..(44): n is a, c, g, or t
  misc_feature (53)..(54): n is a, c, g, or t
tttttttaagcagtggtatcaacgcagagtacnnattgtccgnnactaggagnntttttttttttttttttttttttttttttt

SEQ ID NO: 1240 - DNA, 84 bp, Artificial
  Barcode component
  misc_feature (33)..(34): n is a, c, g, or t
  misc_feature (43)..(44): n is a, c, g, or t
  misc_feature (53)..(54): n is a, c, g, or t
tttttttaagcagtggtatcaacgcagagtacnnattgtccgnnccatagganntttttttttttttttttttttttttttttt

SEQ ID NO: 1241 - DNA, 84 bp, Artificial
  Barcode component
  misc_feature (33)..(34): n is a, c, g, or t
  misc_feature (43)..(44): n is a, c, g, or t
  misc_feature (53)..(54): n is a, c, g, or t
tttttttaagcagtggtatcaacgcagagtacnnattgtccgnnggagaatcnntttttttttttttttttttttttttttttt

SEQ ID NO: 1242 - DNA, 84 bp, Artificial
  Barcode component
  misc_feature (33)..(34): n is a, c, g, or t
  misc_feature (43)..(44): n is a, c, g, or t
  misc_feature (53)..(54): n is a, c, g, or t
tttttttaagcagtggtatcaacgcagagtacnnattgtccgnngccaagaanntttttttttttttttttttttttttttttt

SEQ ID NO: 1243 - DNA, 84 bp, Artificial
  Barcode component
  misc_feature (33)..(34): n is a, c, g, or t
  misc_feature (43)..(44): n is a, c, g, or t
  misc_feature (53)..(54): n is a, c, g, or t
tttttttaagcagtggtatcaacgcagagtacnnattgtccgnnaaggcaagnntttttttttttttttttttttttttttttt

SEQ ID NO: 1244 - DNA, 84 bp, Artificial
  Barcode component
  misc_feature (33)..(34): n is a, c, g, or t
  misc_feature (43)..(44): n is a, c, g, or t
  misc_feature (53)..(54): n is a, c, g, or t
tttttttaagcagtggtatcaacgcagagtacnnattgtccgnnaatgtcgcnntttttttttttttttttttttttttttttt

SEQ ID NO: 1245 - DNA, 84 bp, Artificial
  Barcode component
  misc_feature (33)..(34): n is a, c, g, or t
  misc_feature (43)..(44): n is a, c, g, or t
  misc_feature (53)..(54): n is a, c, g, or t
tttttttaagcagtggtatcaacgcagagtacnnattgtccgnnatggaaccnntttttttttttttttttttttttttttttt

SEQ ID NO: 1246 - DNA, 84 bp, Artificial
  Barcode component
  misc_feature (33)..(34): n is a, c, g, or t
  misc_feature (43)..(44): n is a, c, g, or t
  misc_feature (53)..(54): n is a, c, g, or t
tttttttaagcagtggtatcaacgcagagtacnnattgtccgnnagaggcatnntttttttttttttttttttttttttttttt

SEQ ID NO: 1247 - DNA, 84 bp, Artificial
  Barcode component
  misc_feature (33)..(34): n is a, c, g, or t
  misc_feature (43)..(44): n is a, c, g, or t
  misc_feature (53)..(54): n is a, c, g, or t
tttttttaagcagtggtatcaacgcagagtacnnattgtccgnntgcatagcnntttttttttttttttttttttttttttttt

SEQ ID NO: 1248 - DNA, 84 bp, Artificial
  Barcode component
  misc_feature (33)..(34): n is a, c, g, or t
  misc_feature (43)..(44): n is a, c, g, or t
  misc_feature (53)..(54): n is a, c, g, or t
tttttttaagcagtggtatcaacgcagagtacnnattgtccgnnctaacgganntttttttttttttttttttttttttttttt

SEQ ID NO: 1249 - DNA, 84 bp, Artificial
  Barcode component
  misc_feature (33)..(34): n is a, c, g, or t
  misc_feature (43)..(44): n is a, c, g, or t
  misc_feature (53)..(54): n is a, c, g, or t
tttttttaagcagtggtatcaacgcagagtacnnattgtccgnntatcgaggnntttttttttttttttttttttttttttttt

SEQ ID NO: 1250 - DNA, 84 bp, Artificial
  Barcode component
  misc_feature (33)..(34): n is a, c, g, or t
  misc_feature (43)..(44): n is a, c, g, or t
  misc_feature (53)..(54): n is a, c, g, or t
tttttttaagcagtggtatcaacgcagagtacnnattgtccgnncatagcctnntttttttttttttttttttttttttttttt

SEQ ID NO: 1251 - DNA, 84 bp, Artificial
  Barcode component
  misc_feature (33)..(34): n is a, c, g, or t
  misc_feature (43)..(44): n is a, c, g, or t
  misc_feature (53)..(54): n is a, c, g, or t
tttttttaagcagtggtatcaacgcagagtacnnattgtccgnnatcgagacnntttttttttttttttttttttttttttttt

SEQ ID NO: 1252 - DNA, 84 bp, Artificial
  Barcode component
  misc_feature (33)..(34): n is a, c, g, or t
  misc_feature (43)..(44): n is a, c, g, or t
  misc_feature (53)..(54): n is a, c, g, or t
tttttttaagcagtggtatcaacgcagagtacnnattgtccgnnggaagagtnntttttttttttttttttttttttttttttt

SEQ ID NO: 1253 - DNA, 84 bp, Artificial
  Barcode component
  misc_feature (33)..(34): n is a, c, g, or t
  misc_feature (43)..(44): n is a, c, g, or t
  misc_feature (53)..(54): n is a, c, g, or t
tttttttaagcagtggtatcaacgcagagtacnnattgtccgnnccaagtagnntttttttttttttttttttttttttttttt

SEQ ID NO: 1254 - DNA, 84 bp, Artificial
  Barcode component
  misc_feature (33)..(34): n is a, c, g, or t
  misc_feature (43)..(44): n is a, c, g, or t
  misc_feature (53)..(54): n is a, c, g, or t
tttttttaagcagtggtatcaacgcagagtacnnattgtccgnnctgaacagnntttttttttttttttttttttttttttttt

SEQ ID NO: 1255 - DNA, 84 bp, Artificial
  Barcode component
  misc_feature (33)..(34): n is a, c, g, or t
  misc_feature (43)..(44): n is a, c, g, or t
  misc_feature (53)..(54): n is a, c, g, or t
tttttttaagcagtggtatcaacgcagagtacnnattgtccgnngtaggttcnntttttttttttttttttttttttttttttt

SEQ ID NO: 1256 - DNA, 84 bp, Artificial
  Barcode component
  misc_feature (33)..(34): n is a, c, g, or t
  misc_feature (43)..(44): n is a, c, g, or t
  misc_feature (53)..(54): n is a, c, g, or t
tttttttaagcagtggtatcaacgcagagtacnnattgtccgnngtatggacnntttttttttttttttttttttttttttttt

SEQ ID NO: 1257 - DNA, 84 bp, Artificial
  Barcode component
  misc_feature (33)..(34): n is a, c, g, or t
  misc_feature (43)..(44): n is a, c, g, or t
  misc_feature (53)..(54): n is a, c, g, or t
tttttttaagcagtggtatcaacgcagagtacnnattgtccgnntcgcaacanntttttttttttttttttttttttttttttt

SEQ ID NO: 1258 - DNA, 84 bp, Artificial
  Barcode component
  misc_feature (33)..(34): n is a, c, g, or t
  misc_feature (43)..(44): n is a, c, g, or t
  misc_feature (53)..(54): n is a, c, g, or t
tttttttaagcagtggtatcaacgcagagtacnnattgtccgnnccgctaatnntttttttttttttttttttttttttttttt

SEQ ID NO: 1259 - DNA, 84 bp, Artificial
  Barcode component
  misc_feature (33)..(34): n is a, c, g, or t
  misc_feature (43)..(44): n is a, c, g, or t
  misc_feature (53)..(54): n is a, c, g, or t
tttttttaagcagtggtatcaacgcagagtacnnattgtccgnngattcgcanntttttttttttttttttttttttttttttt

SEQ ID NO: 1260 - DNA, 84 bp, Artificial
  Barcode component
  misc_feature (33)..(34): n is a, c, g, or t
  misc_feature (43)..(44): n is a, c, g, or t
  misc_feature (53)..(54): n is a, c, g, or t
tttttttaagcagtggtatcaacgcagagtacnnattgtccgnncgatggaanntttttttttttttttttttttttttttttt

SEQ ID NO: 1261 - DNA, 84 bp, Artificial
  Barcode component
  misc_feature (33)..(34): n is a, c, g, or t
  misc_feature (43)..(44): n is a, c, g, or t
  misc_feature (53)..(54): n is a, c, g, or t
tttttttaagcagtggtatcaacgcagagtacnnattgtccgnnagcaagganntttttttttttttttttttttttttttttt

SEQ ID NO: 1262 - DNA, 84 bp, Artificial
  Barcode component
  misc_feature (33)..(34): n is a, c, g, or t
  misc_feature (43)..(44): n is a, c, g, or t
  misc_feature (53)..(54): n is a, c, g, or t
tttttttaagcagtggtatcaacgcagagtacnnattgtccgnncgtagcaanntttttttttttttttttttttttttttttt

SEQ ID NO: 1263 - DNA, 84 bp, Artificial
  Barcode component
  misc_feature (33)..(34): n is a, c, g, or t
  misc_feature (43)..(44): n is a, c, g, or t
  misc_feature (53)..(54): n is a, c, g, or t
tttttttaagcagtggtatcaacgcagagtacnnattgtccgnntggcagtanntttttttttttttttttttttttttttttt

SEQ ID NO: 1264 - DNA, 84 bp, Artificial
  Barcode component
  misc_feature (33)..(34): n is a, c, g, or t
  misc_feature (43)..(44): n is a, c, g, or t
  misc_feature (53)..(54): n is a, c, g, or t
tttttttaagcagtggtatcaacgcagagtacnnattgtccgnncggtagttnntttttttttttttttttttttttttttttt

SEQ ID NO: 1265 - DNA, 84 bp, Artificial
  Barcode component
  misc_feature (33)..(34): n is a, c, g, or t
  misc_feature (43)..(44): n is a, c, g, or t
  misc_feature (53)..(54): n is a, c, g, or t
tttttttaagcagtggtatcaacgcagagtacnnattgtccgnntgacttcgnntttttttttttttttttttttttttttttt

SEQ ID NO: 1266 - DNA, 84 bp, Artificial
  Barcode component
  misc_feature (33)..(34): n is a, c, g, or t
  misc_feature (43)..(44): n is a, c, g, or t
  misc_feature (53)..(54): n is a, c, g, or t
tttttttaagcagtggtatcaacgcagagtacnnattgtccgnngagtgcaanntttttttttttttttttttttttttttttt

SEQ ID NO: 1267 - DNA, 84 bp, Artificial
  Barcode component
  misc_feature (33)..(34): n is a, c, g, or t
  misc_feature (43)..(44): n is a, c, g, or t
  misc_feature (53)..(54): n is a, c, g, or t
tttttttaagcagtggtatcaacgcagagtacnnattgtccgnnacggtaacnntttttttttttttttttttttttttttttt

SEQ ID NO: 1268 - DNA, 84 bp, Artificial
  Barcode component
  misc_feature (33)..(34): n is a, c, g, or t
  misc_feature (43)..(44): n is a, c, g, or t
  misc_feature (53)..(54): n is a, c, g, or t
tttttttaagcagtggtatcaacgcagagtacnnattgtccgnnaagtggtgnntttttttttttttttttttttttttttttt

SEQ ID NO: 1269 - DNA, 84 bp, Artificial
  Barcode component
  misc_feature (33)..(34): n is a, c, g, or t
  misc_feature (43)..(44): n is a, c, g, or t
  misc_feature (53)..(54): n is a, c, g, or t
tttttttaagcagtggtatcaacgcagagtacnnattgtccgnnggagacaanntttttttttttttttttttttttttttttt

SEQ ID NO: 1270 - DNA, 84 bp, Artificial
  Barcode component
  misc_feature (33)..(34): n is a, c, g, or t
  misc_feature (43)..(44): n is a, c, g, or t
  misc_feature (53)..(54): n is a, c, g, or t
tttttttaagcagtggtatcaacgcagagtacnnattgtccgnntcaaggacnntttttttttttttttttttttttttttttt

SEQ ID NO: 1271 - DNA, 84 bp, Artificial
  Barcode component
  misc_feature (33)..(34): n is a, c, g, or t
  misc_feature (43)..(44): n is a, c, g, or t
  misc_feature (53)..(54): n is a, c, g, or t
tttttttaagcagtggtatcaacgcagagtacnnattgtccgnnaagagagcnntttttttttttttttttttttttttttttt

SEQ ID NO: 1272 - DNA, 84 bp, Artificial
  Barcode component
  misc_feature (33)..(34): n is a, c, g, or t
  misc_feature (43)..(44): n is a, c, g, or t
  misc_feature (53)..(54): n is a, c, g, or t
tttttttaagcagtggtatcaacgcagagtacnnattgtccgnncgagagatnntttttttttttttttttttttttttttttt

SEQ ID NO: 1273 - DNA, 84 bp, Artificial
  Barcode component
  misc_feature (33)..(34): n is a, c, g, or t
  misc_feature (43)..(44): n is a, c, g, or t
  misc_feature (53)..(54): n is a, c, g, or t
tttttttaagcagtggtatcaacgcagagtacnnattgtccgnnacagatggnntttttttttttttttttttttttttttttt

SEQ ID NO: 1274 - DNA, 84 bp, Artificial
  Barcode component
  misc_feature (33)..(34): n is a, c, g, or t
  misc_feature (43)..(44): n is a, c, g, or t
  misc_feature (53)..(54): n is a, c, g, or t
tttttttaagcagtggtatcaacgcagagtacnnattgtccgnnaggagtcanntttttttttttttttttttttttttttttt

SEQ ID NO: 1275 - DNA, 84 bp, Artificial
  Barcode component
  misc_feature (33)..(34): n is a, c, g, or t
  misc_feature (43)..(44): n is a, c, g, or t
  misc_feature (53)..(54): n is a, c, g, or t
tttttttaagcagtggtatcaacgcagagtacnnattgtccgnncgtgttacnntttttttttttttttttttttttttttttt

SEQ ID NO: 1276 - DNA, 84 bp, Artificial
  Barcode component
  misc_feature (33)..(34): n is a, c, g, or t
  misc_feature (43)..(44): n is a, c, g, or t
  misc_feature (53)..(54): n is a, c, g, or t
tttttttaagcagtggtatcaacgcagagtacnnattgtccgnntagtgtgcnntttttttttttttttttttttttttttttt

SEQ ID NO: 1277 - DNA, 84 bp, Artificial
  Barcode component
  misc_feature (33)..(34): n is a, c, g, or t
  misc_feature (43)..(44): n is a, c, g, or t
  misc_feature (53)..(54): n is a, c, g, or t
tttttttaagcagtggtatcaacgcagagtacnnattgtccgnnctcatgacnntttttttttttttttttttttttttttttt

SEQ ID NO: 1278 - DNA, 84 bp, Artificial
  Barcode component
  misc_feature (33)..(34): n is a, c, g, or t
  misc_feature (43)..(44): n is a, c, g, or t
  misc_feature (53)..(54): n is a, c, g, or t
tttttttaagcagtggtatcaacgcagagtacnnattgtccgnngtatccagnntttttttttttttttttttttttttttttt

SEQ ID NO: 1279 - DNA, 84 bp, Artificial
  Barcode component
  misc_feature (33)..(34): n is a, c, g, or t
  misc_feature (43)..(44): n is a, c, g, or t
  misc_feature (53)..(54): n is a, c, g, or t
tttttttaagcagtggtatcaacgcagagtacnnattgtccgnnacgcctatnntttttttttttttttttttttttttttttt

SEQ ID NO: 1280 - DNA, 84 bp, Artificial
  Barcode component
  misc_feature (33)..(34): n is a, c, g, or t
  misc_feature (43)..(44): n is a, c, g, or t
  misc_feature (53)..(54): n is a, c, g, or t
tttttttaagcagtggtatcaacgcagagtacnnattgtccgnnaacgacctnntttttttttttttttttttttttttttttt

SEQ ID NO: 1281 - DNA, 84 bp, Artificial
  Barcode component
  misc_feature (33)..(34): n is a, c, g, or t
  misc_feature (43)..(44): n is a, c, g, or t
  misc_feature (53)..(54): n is a, c, g, or t
tttttttaagcagtggtatcaacgcagagtacnnattgtccgnnatcaggctnntttttttttttttttttttttttttttttt

SEQ ID NO: 1282 - DNA, 84 bp, Artificial
  Barcode component
  misc_feature (33)..(34): n is a, c, g, or t
  misc_feature (43)..(44): n is a, c, g, or t
  misc_feature (53)..(54): n is a, c, g, or t
tttttttaagcagtggtatcaacgcagagtacnnattgtccgnncaagttcgnntttttttttttttttttttttttttttttt

SEQ ID NO: 1283 - DNA, 84 bp, Artificial
  Barcode component
  misc_feature (33)..(34): n is a, c, g, or t
  misc_feature (43)..(44): n is a, c, g, or t
  misc_feature (53)..(54): n is a, c, g, or t
tttttttaagcagtggtatcaacgcagagtacnnattgtccgnntagccaganntttttttttttttttttttttttttttttt

SEQ ID NO: 1284 - DNA, 84 bp, Artificial
  Barcode component
  misc_feature (33)..(34): n is a, c, g, or t
  misc_feature (43)..(44): n is a, c, g, or t
  misc_feature (53)..(54): n is a, c, g, or t
tttttttaagcagtggtatcaacgcagagtacnnattgtccgnncaatcacgnntttttttttttttttttttttttttttttt

SEQ ID NO: 1285 - DNA, 84 bp, Artificial
  Barcode component
  misc_feature (33)..(34): n is a, c, g, or t
  misc_feature (43)..(44): n is a, c, g, or t
  misc_feature (53)..(54): n is a, c, g, or t
tttttttaagcagtggtatcaacgcagagtacnnattgtccgnngcaacaagnntttttttttttttttttttttttttttttt

SEQ ID NO: 1286 - DNA, 84 bp, Artificial
  Barcode component
  misc_feature (33)..(34): n is a, c, g, or t
  misc_feature (43)..(44): n is a, c, g, or t
  misc_feature (53)..(54): n is a, c, g, or t
tttttttaagcagtggtatcaacgcagagtacnnattgtccgnncacgacaanntttttttttttttttttttttttttttttt

SEQ ID NO: 1287 - DNA, 84 bp, Artificial
  Barcode component
  misc_feature (33)..(34): n is a, c, g, or t
  misc_feature (43)..(44): n is a, c, g, or t
  misc_feature (53)..(54): n is a, c, g, or t
tttttttaagcagtggtatcaacgcagagtacnnattgtccgnntacggaganntttttttttttttttttttttttttttttt

SEQ ID NO: 1288 - DNA, 84 bp, Artificial
  Barcode component
  misc_feature (33)..(34): n is a, c, g, or t
  misc_feature (43)..(44): n is a, c, g, or t
  misc_feature (53)..(54): n is a, c, g, or t
tttttttaagcagtggtatcaacgcagagtacnnattgtccgnncgacaaganntttttttttttttttttttttttttttttt

SEQ ID NO: 1289 - DNA, 84 bp, Artificial
  Barcode component
  misc_feature (33)..(34): n is a, c, g, or t
  misc_feature (43)..(44): n is a, c, g, or t
  misc_feature (53)..(54): n is a, c, g, or t
tttttttaagcagtggtatcaacgcagagtacnnattgtccgnncgaagtganntttttttttttttttttttttttttttttt

SEQ ID NO: 1290 - DNA, 84 bp, Artificial
  Barcode component
  misc_feature (33)..(34): n is a, c, g, or t
  misc_feature (43)..(44): n is a, c, g, or t
  misc_feature (53)..(54): n is a, c, g, or t
tttttttaagcagtggtatcaacgcagagtacnnattgtccgnnagctggtanntttttttttttttttttttttttttttttt

SEQ ID NO: 1291 - DNA, 84 bp, Artificial
  Barcode component
  misc_feature (33)..(34): n is a, c, g, or t
  misc_feature (43)..(44): n is a, c, g, or t
  misc_feature (53)..(54): n is a, c, g, or t
tttttttaagcagtggtatcaacgcagagtacnnattgtccgnnaactaggcnntttttttttttttttttttttttttttttt

SEQ ID NO: 1292 - DNA, 84 bp, Artificial
  Barcode component
  misc_feature (33)..(34): n is a, c, g, or t
  misc_feature (43)..(44): n is a, c, g, or t
  misc_feature (53)..(54): n is a, c, g, or t
tttttttaagcagtggtatcaacgcagagtacnnattgtccgnncagcaagtnntttttttttttttttttttttttttttttt

SEQ ID NO: 1293 - DNA, 84 bp, Artificial
  Barcode component
  misc_feature (33)..(34): n is a, c, g, or t
  misc_feature (43)..(44): n is a, c, g, or t
  misc_feature (53)..(54): n is a, c, g, or t
tttttttaagcagtggtatcaacgcagagtacnnattgtccgnnacgaggtanntttttttttttttttttttttttttttttt

SEQ ID NO: 1294 - DNA, 84 bp, Artificial
  Barcode component
  misc_feature (33)..(34): n is a, c, g, or t
  misc_feature (43)..(44): n is a, c, g, or t
  misc_feature (53)..(54): n is a, c, g, or t
tttttttaagcagtggtatcaacgcagagtacnnattgtccgnncatcttccnntttttttttttttttttttttttttttttt

SEQ ID NO: 1295 - DNA, 84 bp, Artificial
  Barcode component
  misc_feature (33)..(34): n is a, c, g, or t
  misc_feature (43)..(44): n is a, c, g, or t
  misc_feature (53)..(54): n is a, c, g, or t
tttttttaagcagtggtatcaacgcagagtacnnattgtccgnncctgaatcnntttttttttttttttttttttttttttttt

SEQ ID NO: 1296 - DNA, 84 bp, Artificial
  Barcode component
  misc_feature (33)..(34): n is a, c, g, or t
  misc_feature (43)..(44): n is a, c, g, or t
  misc_feature (53)..(54): n is a, c, g, or t
tttttttaagcagtggtatcaacgcagagtacnnattgtccgnntgcagactnntttttttttttttttttttttttttttttt

SEQ ID NO: 1297 - DNA, 84 bp, Artificial
  Barcode component
  misc_feature (33)..(34): n is a, c, g, or t
  misc_feature (43)..(44): n is a, c, g, or t
  misc_feature (53)..(54): n is a, c, g, or t
tttttttaagcagtggtatcaacgcagagtacnnattgtccgnnagatgtggnntttttttttttttttttttttttttttttt

SEQ ID NO: 1298 - DNA, 84 bp, Artificial
  Barcode component
  misc_feature (33)..(34): n is a, c, g, or t
  misc_feature (43)..(44): n is a, c, g, or t
  misc_feature (53)..(54): n is a, c, g, or t
tttttttaagcagtggtatcaacgcagagtacnnattgtccgnnagttcgacnntttttttttttttttttttttttttttttt

SEQ ID NO: 1299 - DNA, 84 bp, Artificial
  Barcode component
  misc_feature (33)..(34): n is a, c, g, or t
  misc_feature (43)..(44): n is a, c, g, or t
  misc_feature (53)..(54): n is a, c, g, or t
tttttttaagcagtggtatcaacgcagagtacnnattgtccgnnacaacctcnntttttttttttttttttttttttttttttt

SEQ ID NO: 1300 - DNA, 84 bp, Artificial
  Barcode component
  misc_feature (33)..(34): n is a, c, g, or t
  misc_feature (43)..(44): n is a, c, g, or t
  misc_feature (53)..(54): n is a, c, g, or t
tttttttaagcagtggtatcaacgcagagtacnnattgtccgnncatggtagnntttttttttttttttttttttttttttttt

SEQ ID NO: 1301 - DNA, 84 bp, Artificial
  Barcode component
  misc_feature (33)..(34): n is a, c, g, or t
  misc_feature (43)..(44): n is a, c, g, or t
  misc_feature (53)..(54): n is a, c, g, or t
tttttttaagcagtggtatcaacgcagagtacnnattgtccgnncgtatctcnntttttttttttttttttttttttttttttt

SEQ ID NO: 1302 - DNA, 84 bp, Artificial
  Barcode component
  misc_feature (33)..(34): n is a, c, g, or t
  misc_feature (43)..(44): n is a, c, g, or t
  misc_feature (53)..(54): n is a, c, g, or t
tttttttaagcagtggtatcaacgcagagtacnnattgtccgnncctagttcnntttttttttttttttttttttttttttttt

SEQ ID NO: 1303 - DNA, 84 bp, Artificial
  Barcode component
  misc_feature (33)..(34): n is a, c, g, or t
  misc_feature (43)..(44): n is a, c, g, or t
  misc_feature (53)..(54): n is a, c, g, or t
tttttttaagcagtggtatcaacgcagagtacnnattgtccgnncaagagtcnntttttttttttttttttttttttttttttt

SEQ ID NO: 1304 - DNA, 84 bp, Artificial
  Barcode component
  misc_feature (33)..(34): n is a, c, g, or t
  misc_feature (43)..(44): n is a, c, g, or t
  misc_feature (53)..(54): n is a, c, g, or t
tttttttaagcagtggtatcaacgcagagtacnntgtccgatnnaatcggcanntttttttttttttttttttttttttttttt

SEQ ID NO: 1305 - DNA, 84 bp, Artificial
  Barcode component
  misc_feature (33)..(34): n is a, c, g, or t
  misc_feature (43)..(44): n is a, c, g, or t
  misc_feature (53)..(54): n is a, c, g, or t
tttttttaagcagtggtatcaacgcagagtacnntgtccgatnntacggcatnntttttttttttttttttttttttttttttt

SEQ ID NO: 1306 - DNA, 84 bp, Artificial
  Barcode component
  misc_feature (33)..(34): n is a, c, g, or t
  misc_feature (43)..(44): n is a, c, g, or t
  misc_feature (53)..(54): n is a, c, g, or t
tttttttaagcagtggtatcaacgcagagtacnntgtccgatnnttggatcgnntttttttttttttttttttttttttttttt

SEQ ID NO: 1307 - DNA, 84 bp, Artificial
  Barcode component
  misc_feature (33)..(34): n is a, c, g, or t
  misc_feature (43)..(44): n is a, c, g, or t
  misc_feature (53)..(54): n is a, c, g, or t
tttttttaagcagtggtatcaacgcagagtacnntgtccgatnntggaacganntttttttttttttttttttttttttttttt

SEQ ID NO: 1308 - DNA, 84 bp, Artificial
  Barcode component
  misc_feature (33)..(34): n is a, c, g, or t
  misc_feature (43)..(44): n is a, c, g, or t
  misc_feature (53)..(54): n is a, c, g, or t
tttttttaagcagtggtatcaacgcagagtacnntgtccgatnnggcaatcanntttttttttttttttttttttttttttttt

SEQ ID NO: 1309 - DNA, 84 bp, Artificial
  Barcode component
  misc_feature (33)..(34): n is a, c, g, or t
  misc_feature (43)..(44): n is a, c, g, or t
  misc_feature (53)..(54): n is a, c, g, or t
tttttttaagcagtggtatcaacgcagagtacnntgtccgatnngaatccganntttttttttttttttttttttttttttttt

SEQ ID NO: 1310 - DNA, 84 bp, Artificial
  Barcode component
  misc_feature (33)..(34): n is a, c, g, or t
  misc_feature (43)..(44): n is a, c, g, or t
  misc_feature (53)..(54): n is a, c, g, or t
tttttttaagcagtggtatcaacgcagagtacnntgtccgatnnttacggtgnntttttttttttttttttttttttttttttt

SEQ ID NO: 1311 - DNA, 84 bp, Artificial
  Barcode component
  misc_feature (33)..(34): n is a, c, g, or t
  misc_feature (43)..(44): n is a, c, g, or t
  misc_feature (53)..(54): n is a, c, g, or t
tttttttaagcagtggtatcaacgcagagtacnntgtccgatnncatatcggnntttttttttttttttttttttttttttttt

SEQ ID NO: 1312 - DNA, 84 bp, Artificial
  Barcode component
  misc_feature (33)..(34): n is a, c, g, or t
  misc_feature (43)..(44): n is a, c, g, or t
  misc_feature (53)..(54): n is a, c, g, or t
tttttttaagcagtggtatcaacgcagagtacnntgtccgatnncttcggtanntttttttttttttttttttttttttttttt

SEQ ID NO: 1313 - DNA, 84 bp, Artificial
  Barcode component
  misc_feature (33)..(34): n is a, c, g, or t
  misc_feature (43)..(44): n is a, c, g, or t
  misc_feature (53)..(54): n is a, c, g, or t
tttttttaagcagtggtatcaacgcagagtacnntgtccgatnntcctaacgnntttttttttttttttttttttttttttttt

SEQ ID NO: 1314 - DNA, 84 bp, Artificial
  Barcode component
  misc_feature (33)..(34): n is a, c, g, or t
  misc_feature (43)..(44): n is a, c, g, or t
  misc_feature (53)..(54): n is a, c, g, or t
tttttttaagcagtggtatcaacgcagagtacnntgtccgatnngtaagccanntttttttttttttttttttttttttttttt

SEQ ID NO: 1315 - DNA, 84 bp, Artificial
  Barcode component
  misc_feature (33)..(34): n is a, c, g, or t
  misc_feature (43)..(44): n is a, c, g, or t
  misc_feature (53)..(54): n is a, c, g, or t
tttttttaagcagtggtatcaacgcagagtacnntgtccgatnntaaggtggnntttttttttttttttttttttttttttttt

SEQ ID NO: 1316 - DNA, 84 bp, Artificial
  Barcode component
  misc_feature (33)..(34): n is a, c, g, or t
  misc_feature (43)..(44): n is a, c, g, or t
  misc_feature (53)..(54): n is a, c, g, or t
tttttttaagcagtggtatcaacgcagagtacnntgtccgatnnggtaagctnntttttttttttttttttttttttttttttt

SEQ ID NO: 1317 - DNA, 84 bp, Artificial
  Barcode component
  misc_feature (33)..(34): n is a, c, g, or t
  misc_feature (43)..(44): n is a, c, g, or t
  misc_feature (53)..(54): n is a, c, g, or t
tttttttaagcagtggtatcaacgcagagtacnntgtccgatnntgtgtcganntttttttttttttttttttttttttttttt

SEQ ID NO: 1318 - DNA, 84 bp, Artificial
  Barcode component
  misc_feature (33)..(34): n is a, c, g, or t
  misc_feature (43)..(44): n is a, c, g, or t
  misc_feature (53)..(54): n is a, c, g, or t
tttttttaagcagtggtatcaacgcagagtacnntgtccgatnngagcatganntttttttttttttttttttttttttttttt

SEQ ID NO: 1319 - DNA, 84 bp, Artificial
  Barcode component
  misc_feature (33)..(34): n is a, c, g, or t
  misc_feature (43)..(44): n is a, c, g, or t
  misc_feature (53)..(54): n is a, c, g, or t
tttttttaagcagtggtatcaacgcagagtacnntgtccgatnntcgaagtcnntttttttttttttttttttttttttttttt

SEQ ID NO: 1320 - DNA, 84 bp, Artificial
  Barcode component
  misc_feature (33)..(34): n is a, c, g, or t
  misc_feature (43)..(44): n is a, c, g, or t
  misc_feature (53)..(54): n is a, c, g, or t
tttttttaagcagtggtatcaacgcagagtacnntgtccgatnnggtgaacanntttttttttttttttttttttttttttttt

SEQ ID NO: 1321 - DNA, 84 bp, Artificial
  Barcode component
  misc_feature (33)..(34): n is a, c, g, or t
  misc_feature (43)..(44): n is a, c, g, or t
  misc_feature (53)..(54): n is a, c, g, or t
tttttttaagcagtggtatcaacgcagagtacnntgtccgatnnacatgcacnntttttttttttttttttttttttttttttt

SEQ ID NO: 1322 - DNA, 84 bp, Artificial
  Barcode component
  misc_feature (33)..(34): n is a, c, g, or t
  misc_feature (43)..(44): n is a, c, g, or t
  misc_feature (53)..(54): n is a, c, g, or t
tttttttaagcagtggtatcaacgcagagtacnntgtccgatnnccaacagtnntttttttttttttttttttttttttttttt

SEQ ID NO: 1323 - DNA, 84 bp, Artificial
  Barcode component
  misc_feature (33)..(34): n is a, c, g, or t
  misc_feature (43)..(44): n is a, c, g, or t
  misc_feature (53)..(54): n is a, c, g, or t
tttttttaagcagtggtatcaacgcagagtacnntgtccgatnnagaacagcnntttttttttttttttttttttttttttttt

SEQ ID NO: 1324 - DNA, 84 bp, Artificial
  Barcode component
  misc_feature (33)..(34): n is a, c, g, or t
  misc_feature (43)..(44): n is a, c, g, or t
  misc_feature (53)..(54): n is a, c, g, or t
tttttttaagcagtggtatcaacgcagagtacnntgtccgatnngaacacgtnntttttttttttttttttttttttttttttt

SEQ ID NO: 1325 - DNA, 84 bp, Artificial
  Barcode component
  misc_feature (33)..(34): n is a, c, g, or t
  misc_feature (43)..(44): n is a, c, g, or t
  misc_feature (53)..(54): n is a, c, g, or t
tttttttaagcagtggtatcaacgcagagtacnntgtccgatnnggtcttcanntttttttttttttttttttttttttttttt

SEQ ID NO: 1326 - DNA, 84 bp, Artificial
  Barcode component
  misc_feature (33)..(34): n is a, c, g, or t
  misc_feature (43)..(44): n is a, c, g, or t
  misc_feature (53)..(54): n is a, c, g, or t
tttttttaagcagtggtatcaacgcagagtacnntgtccgatnnaggttcagnntttttttttttttttttttttttttttttt

SEQ ID NO: 1327 - DNA, 84 bp, Artificial
  Barcode component
  misc_feature (33)..(34): n is a, c, g, or t
  misc_feature (43)..(44): n is a, c, g, or t
  misc_feature (53)..(54): n is a, c, g, or t
tttttttaagcagtggtatcaacgcagagtacnntgtccgatnnctagagcanntttttttttttttttttttttttttttttt

SEQ ID NO: 1328 - DNA, 84 bp, Artificial
  Barcode component
  misc_feature (33)..(34): n is a, c, g, or t
  misc_feature (43)..(44): n is a, c, g, or t
  misc_feature (53)..(54): n is a, c, g, or t
tttttttaagcagtggtatcaacgcagagtacnntgtccgatnncttctagcnntttttttttttttttttttttttttttttt

SEQ ID NO: 1329 - DNA, 84 bp, Artificial
  Barcode component
  misc_feature (33)..(34): n is a, c, g, or t
  misc_feature (43)..(44): n is a, c, g, or t
  misc_feature (53)..(54): n is a, c, g, or t
tttttttaagcagtggtatcaacgcagagtacnntgtccgatnngagtaacgnntttttttttttttttttttttttttttttt

SEQ ID NO: 1330 - DNA, 84 bp, Artificial
  Barcode component
  misc_feature (33)..(34): n is a, c, g, or t
  misc_feature (43)..(44): n is a, c, g, or t
  misc_feature (53)..(54): n is a, c, g, or t
tttttttaagcagtggtatcaacgcagagtacnntgtccgatnnctaagaggnntttttttttttttttttttttttttttttt

SEQ ID NO: 1331 - DNA, 84 bp, Artificial
  Barcode component
  misc_feature (33)..(34): n is a, c, g, or t
  misc_feature (43)..(44): n is a, c, g, or t
  misc_feature (53)..(54): n is a, c, g, or t
tttttttaagcagtggtatcaacgcagagtacnntgtccgatnnacgtgtagnntttttttttttttttttttttttttttttt

SEQ ID NO: 1332 - DNA, 84 bp, Artificial
  Barcode component
  misc_feature (33)..(34): n is a, c, g, or t
  misc_feature (43)..(44): n is a, c, g, or t
  misc_feature (53)..(54): n is a, c, g, or t
tttttttaagcagtggtatcaacgcagagtacnntgtccgatnnactacaggnntttttttttttttttttttttttttttttt

SEQ ID NO: 1333 - DNA, 84 bp, Artificial
  Barcode component
  misc_feature (33)..(34): n is a, c, g, or t
  misc_feature (43)..(44): n is a, c, g, or t
  misc_feature (53)..(54): n is a, c, g, or t
tttttttaagcagtggtatcaacgcagagtacnntgtccgatnntacaggtcnntttttttttttttttttttttttttttttt

SEQ ID NO: 1334 - DNA, 84 bp, Artificial
  Barcode component
  misc_feature (33)..(34): n is a, c, g, or t
  misc_feature (43)..(44): n is a, c, g, or t
  misc_feature (53)..(54): n is a, c, g, or t
tttttttaagcagtggtatcaacgcagagtacnntgtccgatnnctcacatgnntttttttttttttttttttttttttttttt

SEQ ID NO: 1335 - DNA, 84 bp, Artificial
  Barcode component
  misc_feature (33)..(34): n is a, c, g, or t
  misc_feature (43)..(44): n is a, c, g, or t
  misc_feature (53)..(54): n is a, c, g, or t
tttttttaagcagtggtatcaacgcagagtacnntgtccgatnnactaggagnntttttttttttttttttttttttttttttt

SEQ ID NO: 1336 - DNA, 84 bp, Artificial
  Barcode component
  misc_feature (33)..(34): n is a, c, g, or t
  misc_feature (43)..(44): n is a, c, g, or t
  misc_feature (53)..(54): n is a, c, g, or t
tttttttaagcagtggtatcaacgcagagtacnntgtccgatnnccatagganntttttttttttttttttttttttttttttt

SEQ ID NO: 1337 - DNA, 84 bp, Artificial
  Barcode component
  misc_feature (33)..(34): n is a, c, g, or t
  misc_feature (43)..(44): n is a, c, g, or t
  misc_feature (53)..(54): n is a, c, g, or t
tttttttaagcagtggtatcaacgcagagtacnntgtccgatnnggagaatcnntttttttttttttttttttttttttttttt

SEQ ID NO: 1338 - DNA, 84 bp, Artificial
  Barcode component
  misc_feature (33)..(34): n is a, c, g, or t
  misc_feature (43)..(44): n is a, c, g, or t
  misc_feature (53)..(54): n is a, c, g, or t
tttttttaagcagtggtatcaacgcagagtacnntgtccgatnngccaagaanntttttttttttttttttttttttttttttt

SEQ ID NO: 1339 - DNA, 84 bp, Artificial
  Barcode component
  misc_feature (33)..(34): n is a, c, g, or t
  misc_feature (43)..(44): n is a, c, g, or t
  misc_feature (53)..(54): n is a, c, g, or t
tttttttaagcagtggtatcaacgcagagtacnntgtccgatnnaaggcaagnntttttttttttttttttttttttttttttt

SEQ ID NO: 1340 - DNA, 84 bp, Artificial
  Barcode component
  misc_feature (33)..(34): n is a, c, g, or t
  misc_feature (43)..(44): n is a, c, g, or t
  misc_feature (53)..(54): n is a, c, g, or t
tttttttaagcagtggtatcaacgcagagtacnntgtccgatnnaatgtcgcnntttttttttttttttttttttttttttttt

SEQ ID NO: 1341 - DNA, 84 bp, Artificial
  Barcode component
  misc_feature (33)..(34): n is a, c, g, or t
  misc_feature (43)..(44): n is a, c, g, or t
  misc_feature (53)..(54): n is a, c, g, or t
tttttttaagcagtggtatcaacgcagagtacnntgtccgatnnatggaaccnntttttttttttttttttttttttttttttt

SEQ ID NO: 1342 - DNA, 84 bp, Artificial
  Barcode component
  misc_feature (33)..(34): n is a, c, g, or t
  misc_feature (43)..(44): n is a, c, g, or t
  misc_feature (53)..(54): n is a, c, g, or t
tttttttaagcagtggtatcaacgcagagtacnntgtccgatnnagaggcatnntttttttttttttttttttttttttttttt

SEQ ID NO: 1343 - DNA, 84 bp, Artificial
  Barcode component
  misc_feature (33)..(34): n is a, c, g, or t
  misc_feature (43)..(44): n is a, c, g, or t
  misc_feature (53)..(54): n is a, c, g, or t
tttttttaagcagtggtatcaacgcagagtacnntgtccgatnntgcatagcnntttttttttttttttttttttttttttttt

SEQ ID NO: 1344 - DNA, 84 bp, Artificial
  Barcode component
  misc_feature (33)..(34): n is a, c, g, or t
  misc_feature (43)..(44): n is a, c, g, or t
  misc_feature (53)..(54): n is a, c, g, or t
tttttttaagcagtggtatcaacgcagagtacnntgtccgatnnctaacgganntttttttttttttttttttttttttttttt

SEQ ID NO: 1345 - DNA, 84 bp, Artificial
  Barcode component
  misc_feature (33)..(34): n is a, c, g, or t
  misc_feature (43)..(44): n is a, c, g, or t
  misc_feature (53)..(54): n is a, c, g, or t
tttttttaagcagtggtatcaacgcagagtacnntgtccgatnntatcgaggnntttttttttttttttttttttttttttttt

SEQ ID NO: 1346 - DNA, 84 bp, Artificial
  Barcode component
  misc_feature (33)..(34): n is a, c, g, or t
  misc_feature (43)..(44): n is a, c, g, or t
  misc_feature (53)..(54): n is a, c, g, or t
tttttttaagcagtggtatcaacgcagagtacnntgtccgatnncatagcctnntttttttttttttttttttttttttttttt

SEQ ID NO: 1347 - DNA, 84 bp, Artificial
  Barcode component
  misc_feature (33)..(34): n is a, c, g, or t
  misc_feature (43)..(44): n is a, c, g, or t
  misc_feature (53)..(54): n is a, c, g, or t
tttttttaagcagtggtatcaacgcagagtacnntgtccgatnnatcgagacnntttttttttttttttttttttttttttttt

SEQ ID NO: 1348 - DNA, 84 bp, Artificial
  Barcode component
  misc_feature (33)..(34): n is a, c, g, or t
  misc_feature (43)..(44): n is a, c, g, or t
  misc_feature (53)..(54): n is a, c, g, or t
tttttttaagcagtggtatcaacgcagagtacnntgtccgatnnggaagagtnntttttttttttttttttttttttttttttt

SEQ ID NO: 1349 - DNA, 84 bp, Artificial
  Barcode component
  misc_feature (33)..(34): n is a, c, g, or t
  misc_feature (43)..(44): n is a, c, g, or t
  misc_feature (53)..(54): n is a, c, g, or t
tttttttaagcagtggtatcaacgcagagtacnntgtccgatnnccaagtagnntttttttttttttttttttttttttttttt

SEQ ID NO: 1350 - DNA, 84 bp, Artificial
  Barcode component
  misc_feature (33)..(34): n is a, c, g, or t
  misc_feature (43)..(44): n is a, c, g, or t
  misc_feature (53)..(54): n is a, c, g, or t
tttttttaagcagtggtatcaacgcagagtacnntgtccgatnnctgaacagnntttttttttttttttttttttttttttttt

SEQ ID NO: 1351 - DNA, 84 bp, Artificial
  Barcode component
  misc_feature (33)..(34): n is a, c, g, or t
  misc_feature (43)..(44): n is a, c, g, or t
  misc_feature (53)..(54): n is a, c, g, or t
tttttttaagcagtggtatcaacgcagagtacnntgtccgatnngtaggttcnntttttttttttttttttttttttttttttt

SEQ ID NO: 1352 - DNA, 84 bp, Artificial
  Barcode component
  misc_feature (33)..(34): n is a, c, g, or t
  misc_feature (43)..(44): n is a, c, g, or t
  misc_feature (53)..(54): n is a, c, g, or t
tttttttaagcagtggtatcaacgcagagtacnntgtccgatnngtatggacnntttttttttttttttttttttttttttttt

SEQ ID NO: 1353 - DNA, 84 bp, Artificial
  Barcode component
  misc_feature (33)..(34): n is a, c, g, or t
  misc_feature (43)..(44): n is a, c, g, or t
  misc_feature (53)..(54): n is a, c, g, or t
tttttttaagcagtggtatcaacgcagagtacnntgtccgatnntcgcaacanntttttttttttttttttttttttttttttt

SEQ ID NO: 1354 - DNA, 84 bp, Artificial
  Barcode component
  misc_feature (33)..(34): n is a, c, g, or t
  misc_feature (43)..(44): n is a, c, g, or t
  misc_feature (53)..(54): n is a, c, g, or t
tttttttaagcagtggtatcaacgcagagtacnntgtccgatnnccgctaatnntttttttttttttttttttttttttttttt

SEQ ID NO: 1355 - DNA, 84 bp, Artificial
  Barcode component
  misc_feature (33)..(34): n is a, c, g, or t
  misc_feature (43)..(44): n is a, c, g, or t
  misc_feature (53)..(54): n is a, c, g, or t
tttttttaagcagtggtatcaacgcagagtacnntgtccgatnngattcgcanntttttttttttttttttttttttttttttt

SEQ ID NO: 1356 - DNA, 84 bp, Artificial
  Barcode component
  misc_feature (33)..(34): n is a, c, g, or t
  misc_feature (43)..(44): n is a, c, g, or t
  misc_feature (53)..(54): n is a, c, g, or t
tttttttaagcagtggtatcaacgcagagtacnntgtccgatnncgatggaanntttttttttttttttttttttttttttttt

SEQ ID NO: 1357 - DNA, 84 bp, Artificial
  Barcode component
  misc_feature (33)..(34): n is a, c, g, or t
  misc_feature (43)..(44): n is a, c, g, or t
  misc_feature (53)..(54): n is a, c, g, or t
tttttttaagcagtggtatcaacgcagagtacnntgtccgatnnagcaagganntttttttttttttttttttttttttttttt

SEQ ID NO: 1358 - DNA, 84 bp, Artificial
  Barcode component
  misc_feature (33)..(34): n is a, c, g, or t
  misc_feature (43)..(44): n is a, c, g, or t
  misc_feature (53)..(54): n is a, c, g, or t
tttttttaagcagtggtatcaacgcagagtacnntgtccgatnncgtagcaanntttttttttttttttttttttttttttttt

SEQ ID NO: 1359 - DNA, 84 bp, Artificial
  Barcode component
  misc_feature (33)..(34): n is a, c, g, or t
  misc_feature (43)..(44): n is a, c, g, or t
  misc_feature (53)..(54): n is a, c, g, or t
tttttttaagcagtggtatcaacgcagagtacnntgtccgatnntggcagtanntttttttttttttttttttttttttttttt

SEQ ID NO: 1360 - DNA, 84 bp, Artificial
  Barcode component
  misc_feature (33)..(34): n is a, c, g, or t
  misc_feature (43)..(44): n is a, c, g, or t
  misc_feature (53)..(54): n is a, c, g, or t
tttttttaagcagtggtatcaacgcagagtacnntgtccgatnncggtagttnntttttttttttttttttttttttttttttt

SEQ ID NO: 1361 - DNA, 84 bp, Artificial
  Barcode component
  misc_feature (33)..(34): n is a, c, g, or t
  misc_feature (43)..(44): n is a, c, g, or t
  misc_feature (53)..(54): n is a, c, g, or t
tttttttaagcagtggtatcaacgcagagtacnntgtccgatnntgacttcgnntttttttttttttttttttttttttttttt

SEQ ID NO: 1362 - DNA, 84 bp, Artificial
  Barcode component
  misc_feature (33)..(34): n is a, c, g, or t
  misc_feature (43)..(44): n is a, c, g, or t
  misc_feature (53)..(54): n is a, c, g, or t
tttttttaagcagtggtatcaacgcagagtacnntgtccgatnngagtgcaanntttttttttttttttttttttttttttttt

SEQ ID NO: 1363 - DNA, 84 bp, Artificial
  Barcode component
  misc_feature (33)..(34): n is a, c, g, or t
  misc_feature (43)..(44): n is a, c, g, or t
  misc_feature (53)..(54): n is a, c, g, or t
tttttttaagcagtggtatcaacgcagagtacnntgtccgatnnacggtaacnntttttttttttttttttttttttttttttt

SEQ ID NO: 1364 - DNA, 84 bp, Artificial
  Barcode component
  misc_feature (33)..(34): n is a, c, g, or t
  misc_feature (43)..(44): n is a, c, g, or t
  misc_feature (53)..(54): n is a, c, g, or t
tttttttaagcagtggtatcaacgcagagtacnntgtccgatnnaagtggtgnntttttttttttttttttttttttttttttt

SEQ ID NO: 1365 - DNA, 84 bp, Artificial
  Barcode component
  misc_feature (33)..(34): n is a, c, g, or t
  misc_feature (43)..(44): n is a, c, g, or t
  misc_feature (53)..(54): n is a, c, g, or t
tttttttaagcagtggtatcaacgcagagtacnntgtccgatnnggagacaanntttttttttttttttttttttttttttttt

SEQ ID NO: 1366 - DNA, 84 bp, Artificial
  Barcode component
  misc_feature (33)..(34): n is a, c, g, or t
  misc_feature (43)..(44): n is a, c, g, or t
  misc_feature (53)..(54): n is a, c, g, or t
tttttttaagcagtggtatcaacgcagagtacnntgtccgatnntcaaggacnntttttttttttttttttttttttttttttt

SEQ ID NO: 1367 - DNA, 84 bp, Artificial
  Barcode component
  misc_feature (33)..(34): n is a, c, g, or t
  misc_feature (43)..(44): n is a, c, g, or t
  misc_feature (53)..(54): n is a, c, g, or t
tttttttaagcagtggtatcaacgcagagtacnntgtccgatnnaagagagcnntttttttttttttttttttttttttttttt

SEQ ID NO: 1368 - DNA, 84 bp, Artificial
  Barcode component
  misc_feature (33)..(34): n is a, c, g, or t
  misc_feature (43)..(44): n is a, c, g, or t
  misc_feature (53)..(54): n is a, c, g, or t
tttttttaagcagtggtatcaacgcagagtacnntgtccgatnncgagagatnntttttttttttttttttttttttttttttt

SEQ ID NO: 1369 - DNA, 84 bp, Artificial
  Barcode component
  misc_feature (33)..(34): n is a, c, g, or t
  misc_feature (43)..(44): n is a, c, g, or t
  misc_feature (53)..(54): n is a, c, g, or t
tttttttaagcagtggtatcaacgcagagtacnntgtccgatnnacagatggnntttttttttttttttttttttttttttttt

SEQ ID NO: 1370 - DNA, 84 bp, Artificial
  Barcode component
  misc_feature (33)..(34): n is a, c, g, or t
  misc_feature (43)..(44): n is a, c, g, or t
  misc_feature (53)..(54): n is a, c, g, or t
tttttttaagcagtggtatcaacgcagagtacnntgtccgatnnaggagtcanntttttttttttttttttttttttttttttt

SEQ ID NO: 1371 - DNA, 84 bp, Artificial
  Barcode component
  misc_feature (33)..(34): n is a, c, g, or t
  misc_feature (43)..(44): n is a, c, g, or t
  misc_feature (53)..(54): n is a, c, g, or t
tttttttaagcagtggtatcaacgcagagtacnntgtccgatnncgtgttacnntttttttttttttttttttttttttttttt

SEQ ID NO: 1372 - DNA, 84 bp, Artificial
  Barcode component
  misc_feature (33)..(34): n is a, c, g, or t
  misc_feature (43)..(44): n is a, c, g, or t
  misc_feature (53)..(54): n is a, c, g, or t
tttttttaagcagtggtatcaacgcagagtacnntgtccgatnntagtgtgcnntttttttttttttttttttttttttttttt

SEQ ID NO: 1373 - DNA, 84 bp, Artificial
  Barcode component
  misc_feature (33)..(34): n is a, c, g, or t
  misc_feature (43)..(44): n is a, c, g, or t
  misc_feature (53)..(54): n is a, c, g, or t
tttttttaagcagtggtatcaacgcagagtacnntgtccgatnnctcatgacnntttttttttttttttttttttttttttttt

SEQ ID NO: 1374 - DNA, 84 bp, Artificial
  Barcode component
  misc_feature (33)..(34): n is a, c, g, or t
  misc_feature (43)..(44): n is a, c, g, or t
  misc_feature (53)..(54): n is a, c, g, or t
tttttttaagcagtggtatcaacgcagagtacnntgtccgatnngtatccagnntttttttttttttttttttttttttttttt

SEQ ID NO: 1375 - DNA, 84 bp, Artificial
  Barcode component
  misc_feature (33)..(34): n is a, c, g, or t
  misc_feature (43)..(44): n is a, c, g, or t
  misc_feature (53)..(54): n is a, c, g, or t
tttttttaagcagtggtatcaacgcagagtacnntgtccgatnnacgcctatnntttttttttttttttttttttttttttttt

SEQ ID NO: 1376 - DNA, 84 bp, Artificial
  Barcode component
  misc_feature (33)..(34): n is a, c, g, or t
  misc_feature (43)..(44): n is a, c, g, or t
  misc_feature (53)..(54): n is a, c, g, or t
tttttttaagcagtggtatcaacgcagagtacnntgtccgatnnaacgacctnntttttttttttttttttttttttttttttt

SEQ ID NO: 1377 - DNA, 84 bp, Artificial
  Barcode component
  misc_feature (33)..(34): n is a, c, g, or t
  misc_feature (43)..(44): n is a, c, g, or t
  misc_feature (53)..(54): n is a, c, g, or t
tttttttaagcagtggtatcaacgcagagtacnntgtccgatnnatcaggctnntttttttttttttttttttttttttttttt

SEQ ID NO: 1378 - DNA, 84 bp, Artificial
  Barcode component
  misc_feature (33)..(34): n is a, c, g, or t
  misc_feature (43)..(44): n is a, c, g, or t
  misc_feature (53)..(54): n is a, c, g, or t
tttttttaagcagtggtatcaacgcagagtacnntgtccgatnncaagttcgnntttttttttttttttttttttttttttttt

SEQ ID NO: 1379 - DNA, 84 bp, Artificial
  Barcode component
  misc_feature (33)..(34): n is a, c, g, or t
  misc_feature (43)..(44): n is a, c, g, or t
  misc_feature (53)..(54): n is a, c, g, or t
tttttttaagcagtggtatcaacgcagagtacnntgtccgatnntagccaganntttttttttttttttttttttttttttttt

SEQ ID NO: 1380 - DNA, 84 bp, Artificial
  Barcode component
  misc_feature (33)..(34): n is a, c, g, or t
  misc_feature (43)..(44): n is a, c, g, or t
  misc_feature (53)..(54): n is a, c, g, or t
tttttttaagcagtggtatcaacgcagagtacnntgtccgatnncaatcacgnntttttttttttttttttttttttttttttt

SEQ ID NO: 1381 - DNA, 84 bp, Artificial
  Barcode component
  misc_feature (33)..(34): n is a, c, g, or t
  misc_feature (43)..(44): n is a, c, g, or t
  misc_feature (53)..(54): n is a, c, g, or t
tttttttaagcagtggtatcaacgcagagtacnntgtccgatnngcaacaagnntttttttttttttttttttttttttttttt

SEQ ID NO: 1382 - DNA, 84 bp, Artificial
  Barcode component
  misc_feature (33)..(34): n is a, c, g, or t
  misc_feature (43)..(44): n is a, c, g, or t
  misc_feature (53)..(54): n is a, c, g, or t
tttttttaagcagtggtatcaacgcagagtacnntgtccgatnncacgacaanntttttttttttttttttttttttttttttt

SEQ ID NO: 1383 - DNA, 84 bp, Artificial
  Barcode component
  misc_feature (33)..(34): n is a, c, g, or t
  misc_feature (43)..(44): n is a, c, g, or t
  misc_feature (53)..(54): n is a, c, g, or t
tttttttaagcagtggtatcaacgcagagtacnntgtccgatnntacggaganntttttttttttttttttttttttttttttt

SEQ ID NO: 1384 - DNA, 84 bp, Artificial
  Barcode component
  misc_feature (33)..(34): n is a, c, g, or t
  misc_feature (43)..(44): n is a, c, g, or t
  misc_feature (53)..(54): n is a, c, g, or t
tttttttaagcagtggtatcaacgcagagtacnntgtccgatnncgacaaganntttttttttttttttttttttttttttttt

SEQ ID NO: 1385 - DNA, 84 bp, Artificial
  Barcode component
  misc_feature (33)..(34): n is a, c, g, or t
  misc_feature (43)..(44): n is a, c, g, or t
  misc_feature (53)..(54): n is a, c, g, or t
tttttttaagcagtggtatcaacgcagagtacnntgtccgatnncgaagtganntttttttttttttttttttttttttttttt

SEQ ID NO: 1386 - DNA, 84 bp, Artificial
  Barcode component
  misc_feature (33)..(34): n is a, c, g, or t
  misc_feature (43)..(44): n is a, c, g, or t
  misc_feature (53)..(54): n is a, c, g, or t
tttttttaagcagtggtatcaacgcagagtacnntgtccgatnnagctggtanntttttttttttttttttttttttttttttt

SEQ ID NO: 1387 - DNA, 84 bp, Artificial
  Barcode component
  misc_feature (33)..(34): n is a, c, g, or t
  misc_feature (43)..(44): n is a, c, g, or t
  misc_feature (53)..(54): n is a, c, g, or t
tttttttaagcagtggtatcaacgcagagtacnntgtccgatnnaactaggcnntttttttttttttttttttttttttttttt

SEQ ID NO: 1388 - DNA, 84 bp, Artificial
  Barcode component
  misc_feature (33)..(34): n is a, c, g, or t
  misc_feature (43)..(44): n is a, c, g, or t
  misc_feature (53)..(54): n is a, c, g, or t
tttttttaagcagtggtatcaacgcagagtacnntgtccgatnncagcaagtnntttttttttttttttttttttttttttttt

SEQ ID NO: 1389 - DNA, 84 bp, Artificial
  Barcode component
  misc_feature (33)..(34): n is a, c, g, or t
  misc_feature (43)..(44): n is a, c, g, or t
  misc_feature (53)..(54): n is a, c, g, or t
tttttttaagcagtggtatcaacgcagagtacnntgtccgatnnacgaggtanntttttttttttttttttttttttttttttt

SEQ ID NO: 1390 - DNA, 84 bp, Artificial
  Barcode component
  misc_feature (33)..(34): n is a, c, g, or t
  misc_feature (43)..(44): n is a, c, g, or t
  misc_feature (53)..(54): n is a, c, g, or t
tttttttaagcagtggtatcaacgcagagtacnntgtccgatnncatcttccnntttttttttttttttttttttttttttttt

SEQ ID NO: 1391 - DNA, 84 bp, Artificial
  Barcode component
  misc_feature (33)..(34): n is a, c, g, or t
  misc_feature (43)..(44): n is a, c, g, or t
  misc_feature (53)..(54): n is a, c, g, or t
tttttttaagcagtggtatcaacgcagagtacnntgtccgatnncctgaatcnntttttttttttttttttttttttttttttt

SEQ ID NO: 1392 - DNA, 84 bp, Artificial
  Barcode component
  misc_feature (33)..(34): n is a, c, g, or t
  misc_feature (43)..(44): n is a, c, g, or t
  misc_feature (53)..(54): n is a, c, g, or t
tttttttaagcagtggtatcaacgcagagtacnntgtccgatnntgcagactnntttttttttttttttttttttttttttttt

SEQ ID NO: 1393 - DNA, 84 bp, Artificial
  Barcode component
  misc_feature (33)..(34): n is a, c, g, or t
  misc_feature (43)..(44): n is a, c, g, or t
  misc_feature (53)..(54): n is a, c, g, or t
tttttttaagcagtggtatcaacgcagagtacnntgtccgatnnagatgtggnntttttttttttttttttttttttttttttt

SEQ ID NO: 1394 - DNA, 84 bp, Artificial
  Barcode component
  misc_feature (33)..(34): n is a, c, g, or t
  misc_feature (43)..(44): n is a, c, g, or t
  misc_feature (53)..(54): n is a, c, g, or t
tttttttaagcagtggtatcaacgcagagtacnntgtccgatnnagttcgacnntttttttttttttttttttttttttttttt

SEQ ID NO: 1395 - DNA, 84 bp, Artificial
  Barcode component
  misc_feature (33)..(34): n is a, c, g, or t
  misc_feature (43)..(44): n is a, c, g, or t
  misc_feature (53)..(54): n is a, c, g, or t
tttttttaagcagtggtatcaacgcagagtacnntgtccgatnnacaacctcnntttttttttttttttttttttttttttttt

SEQ ID NO: 1396 - DNA, 84 bp, Artificial
  Barcode component
  misc_feature (33)..(34): n is a, c, g, or t
  misc_feature (43)..(44): n is a, c, g, or t
  misc_feature (53)..(54): n is a, c, g, or t
tttttttaagcagtggtatcaacgcagagtacnntgtccgatnncatggtagnntttttttttttttttttttttttttttttt

SEQ ID NO: 1397 - DNA, 84 bp, Artificial
  Barcode component
  misc_feature (33)..(34): n is a, c, g, or t
  misc_feature (43)..(44): n is a, c, g, or t
  misc_feature (53)..(54): n is a, c, g, or t
tttttttaagcagtggtatcaacgcagagtacnntgtccgatnncgtatctcnntttttttttttttttttttttttttttttt

SEQ ID NO: 1398 - DNA, 84 bp, Artificial
  Barcode component
  misc_feature (33)..(34): n is a, c, g, or t
  misc_feature (43)..(44): n is a, c, g, or t
  misc_feature (53)..(54): n is a, c, g, or t
tttttttaagcagtggtatcaacgcagagtacnntgtccgatnncctagttcnntttttttttttttttttttttttttttttt

SEQ ID NO: 1399 - DNA, 84 bp, Artificial
  Barcode component
  misc_feature (33)..(34): n is a, c, g, or t
  misc_feature (43)..(44): n is a, c, g, or t
  misc_feature (53)..(54): n is a, c, g, or t
tttttttaagcagtggtatcaacgcagagtacnntgtccgatnncaagagtcnntttttttttttttttttttttttttttttt

SEQ ID NO: 1400 - DNA, 84 bp, Artificial
  Barcode component
  misc_feature (33)..(34): n is a, c, g, or t
  misc_feature (43)..(44): n is a, c, g, or t
  misc_feature (53)..(54): n is a, c, g, or t
tttttttaagcagtggtatcaacgcagagtacnngctattcgnnaatcggcanntttttttttttttttttttttttttttttt

SEQ ID NO: 1401 - DNA, 84 bp, Artificial
  Barcode component
  misc_feature (33)..(34): n is a, c, g, or t
  misc_feature (43)..(44): n is a, c, g, or t
  misc_feature (53)..(54): n is a, c, g, or t
tttttttaagcagtggtatcaacgcagagtacnngctattcgnntacggcatnntttttttttttttttttttttttttttttt

SEQ ID NO: 1402 - DNA, 84 bp, Artificial
  Barcode component
  misc_feature (33)..(34): n is a, c, g, or t
  misc_feature (43)..(44): n is a, c, g, or t
  misc_feature (53)..(54): n is a, c, g, or t
tttttttaagcagtggtatcaacgcagagtacnngctattcgnnttggatcgnntttttttttttttttttttttttttttttt

SEQ ID NO: 1403 - DNA, 84 bp, Artificial
  Barcode component
  misc_feature (33)..(34): n is a, c, g, or t
  misc_feature (43)..(44): n is a, c, g, or t
  misc_feature (53)..(54): n is a, c, g, or t
tttttttaagcagtggtatcaacgcagagtacnngctattcgnntggaacganntttttttttttttttttttttttttttttt

SEQ ID NO: 1404 - DNA, 84 bp, Artificial
  Barcode component
  misc_feature (33)..(34): n is a, c, g, or t
  misc_feature (43)..(44): n is a, c, g, or t
  misc_feature (53)..(54): n is a, c, g, or t
tttttttaagcagtggtatcaacgcagagtacnngctattcgnnggcaatcanntttttttttttttttttttttttttttttt

SEQ ID NO: 1405 - DNA, 84 bp, Artificial
  Barcode component
  misc_feature (33)..(34): n is a, c, g, or t
  misc_feature (43)..(44): n is a, c, g, or t
  misc_feature (53)..(54): n is a, c, g, or t
tttttttaagcagtggtatcaacgcagagtacnngctattcgnngaatccganntttttttttttttttttttttttttttttt

SEQ ID NO: 1406 - DNA, 84 bp, Artificial
  Barcode component
  misc_feature (33)..(34): n is a, c, g, or t
  misc_feature (43)..(44): n is a, c, g, or t
  misc_feature (53)..(54): n is a, c, g, or t
tttttttaagcagtggtatcaacgcagagtacnngctattcgnnttacggtgnntttttttttttttttttttttttttttttt

SEQ ID NO: 1407 - DNA, 84 bp, Artificial
  Barcode component
  misc_feature (33)..(34): n is a, c, g, or t
  misc_feature (43)..(44): n is a, c, g, or t
  misc_feature (53)..(54): n is a, c, g, or t
tttttttaagcagtggtatcaacgcagagtacnngctattcgnncatatcggnntttttttttttttttttttttttttttttt

SEQ ID NO: 1408 - DNA, 84 bp, Artificial
  Barcode component
  misc_feature (33)..(34): n is a, c, g, or t
  misc_feature (43)..(44): n is a, c, g, or t
  misc_feature (53)..(54): n is a, c, g, or t
tttttttaagcagtggtatcaacgcagagtacnngctattcgnncttcggtanntttttttttttttttttttttttttttttt

SEQ ID NO: 1409 - DNA, 84 bp, Artificial
  Barcode component
  misc_feature (33)..(34): n is a, c, g, or t
  misc_feature (43)..(44): n is a, c, g, or t
  misc_feature (53)..(54): n is a, c, g, or t
tttttttaagcagtggtatcaacgcagagtacnngctattcgnntcctaacgnntttttttttttttttttttttttttttttt

SEQ ID NO: 1410 - DNA, 84 bp, Artificial
  Barcode component
  misc_feature (33)..(34): n is a, c, g, or t
  misc_feature (43)..(44): n is a, c, g, or t
  misc_feature (53)..(54): n is a, c, g, or t
tttttttaagcagtggtatcaacgcagagtacnngctattcgnngtaagccanntttttttttttttttttttttttttttttt

SEQ ID NO: 1411 - DNA, 84 bp, Artificial
  Barcode component
  misc_feature (33)..(34): n is a, c, g, or t
  misc_feature (43)..(44): n is a, c, g, or t
  misc_feature (53)..(54): n is a, c, g, or t
tttttttaagcagtggtatcaacgcagagtacnngctattcgnntaaggtggnntttttttttttttttttttttttttttttt

SEQ ID NO: 1412 - DNA, 84 bp, Artificial
  Barcode component
  misc_feature (33)..(34): n is a, c, g, or t
  misc_feature (43)..(44): n is a, c, g, or t
  misc_feature (53)..(54): n is a, c, g, or t
tttttttaagcagtggtatcaacgcagagtacnngctattcgnnggtaagctnntttttttttttttttttttttttttttttt

SEQ ID NO: 1413 - DNA, 84 bp, Artificial
  Barcode component
  misc_feature (33)..(34): n is a, c, g, or t
  misc_feature (43)..(44): n is a, c, g, or t
  misc_feature (53)..(54): n is a, c, g, or t
tttttttaagcagtggtatcaacgcagagtacnngctattcgnntgtgtcganntttttttttttttttttttttttttttttt

SEQ ID NO: 1414 - DNA, 84 bp, Artificial
  Barcode component
  misc_feature (33)..(34): n is a, c, g, or t
  misc_feature (43)..(44): n is a, c, g, or t
  misc_feature (53)..(54): n is a, c, g, or t
tttttttaagcagtggtatcaacgcagagtacnngctattcgnngagcatganntttttttttttttttttttttttttttttt

SEQ ID NO: 1415 - DNA, 84 bp, Artificial
  Barcode component
  misc_feature (33)..(34): n is a, c, g, or t
  misc_feature (43)..(44): n is a, c, g, or t
  misc_feature (53)..(54): n is a, c, g, or t
tttttttaagcagtggtatcaacgcagagtacnngctattcgnntcgaagtcnntttttttttttttttttttttttttttttt

SEQ ID NO: 1416 - DNA, 84 bp, Artificial
  Barcode component
  misc_feature (33)..(34): n is a, c, g, or t
  misc_feature (43)..(44): n is a, c, g, or t
  misc_feature (53)..(54): n is a, c, g, or t
tttttttaagcagtggtatcaacgcagagtacnngctattcgnnggtgaacanntttttttttttttttttttttttttttttt

SEQ ID NO: 1417 - DNA, 84 bp, Artificial
  Barcode component
  misc_feature (33)..(34): n is a, c, g, or t
  misc_feature (43)..(44): n is a, c, g, or t
  misc_feature (53)..(54): n is a, c, g, or t
tttttttaagcagtggtatcaacgcagagtacnngctattcgnnacatgcacnntttttttttttttttttttttttttttttt

SEQ ID NO: 1418 - DNA, 84 bp, Artificial
  Barcode component
  misc_feature (33)..(34): n is a, c, g, or t
  misc_feature (43)..(44): n is a, c, g, or t
  misc_feature (53)..(54): n is a, c, g, or t
tttttttaagcagtggtatcaacgcagagtacnngctattcgnnccaacagtnntttttttttttttttttttttttttttttt

SEQ ID NO: 1419 - DNA, 84 bp, Artificial
  Barcode component
  misc_feature (33)..(34): n is a, c, g, or t
  misc_feature (43)..(44): n is a, c, g, or t
  misc_feature (53)..(54): n is a, c, g, or t
tttttttaagcagtggtatcaacgcagagtacnngctattcgnnagaacagcnntttttttttttttttttttttttttttttt

SEQ ID NO: 1420 - DNA, 84 bp, Artificial
  Barcode component
  misc_feature (33)..(34): n is a, c, g, or t
  misc_feature (43)..(44): n is a, c, g, or t
  misc_feature (53)..(54): n is a, c, g, or t
tttttttaagcagtggtatcaacgcagagtacnngctattcgnngaacacgtnntttttttttttttttttttttttttttttt

SEQ ID NO: 1421 - DNA, 84 bp, Artificial
  Barcode component
  misc_feature (33)..(34): n is a, c, g, or t
  misc_feature (43)..(44): n is a, c, g, or t
  misc_feature (53)..(54): n is a, c, g, or t
tttttttaagcagtggtatcaacgcagagtacnngctattcgnnggtcttcanntttttttttttttttttttttttttttttt

SEQ ID NO: 1422 - DNA, 84 bp, Artificial
  Barcode component
  misc_feature (33)..(34): n is a, c, g, or t
  misc_feature (43)..(44): n is a, c, g, or t
  misc_feature (53)..(54): n is a, c, g, or t
tttttttaagcagtggtatcaacgcagagtacnngctattcgnnaggttcagnntttttttttttttttttttttttttttttt

SEQ ID NO: 1423 - DNA, 84 bp, Artificial
  Barcode component
  misc_feature (33)..(34): n is a, c, g, or t
  misc_feature (43)..(44): n is a, c, g, or t
  misc_feature (53)..(54): n is a, c, g, or t
tttttttaagcagtggtatcaacgcagagtacnngctattcgnnctagagcanntttttttttttttttttttttttttttttt

SEQ ID NO: 1424 - DNA, 84 bp, Artificial
  Barcode component
  misc_feature (33)..(34): n is a, c, g, or t
  misc_feature (43)..(44): n is a, c, g, or t
  misc_feature (53)..(54): n is a, c, g, or t
tttttttaagcagtggtatcaacgcagagtacnngctattcgnncttctagcnntttttttttttttttttttttttttttttt

SEQ ID NO: 1425 - DNA, 84 bp, Artificial
  Barcode component
  misc_feature (33)..(34): n is a, c, g, or t
  misc_feature (43)..(44): n is a, c, g, or t
  misc_feature (53)..(54): n is a, c, g, or t
tttttttaagcagtggtatcaacgcagagtacnngctattcgnngagtaacgnntttttttttttttttttttttttttttttt

SEQ ID NO: 1426 - DNA, 84 bp, Artificial
  Barcode component
  misc_feature (33)..(34): n is a, c, g, or t
  misc_feature (43)..(44): n is a, c, g, or t
  misc_feature (53)..(54): n is a, c, g, or t
tttttttaagcagtggtatcaacgcagagtacnngctattcgnnctaagaggnntttttttttttttttttttttttttttttt

SEQ ID NO: 1427 - DNA, 84 bp, Artificial
  Barcode component
  misc_feature (33)..(34): n is a, c, g, or t
  misc_feature (43)..(44): n is a, c, g, or t
  misc_feature (53)..(54): n is a, c, g, or t
tttttttaagcagtggtatcaacgcagagtacnngctattcgnnacgtgtagnntttttttttttttttttttttttttttttt

SEQ ID NO: 1428 - DNA, 84 bp, Artificial
  Barcode component
  misc_feature (33)..(34): n is a, c, g, or t
  misc_feature (43)..(44): n is a, c, g, or t
  misc_feature (53)..(54): n is a, c, g, or t
tttttttaagcagtggtatcaacgcagagtacnngctattcgnnactacaggnntttttttttttttttttttttttttttttt

SEQ ID NO: 1429 - DNA, 84 bp, Artificial
  Barcode component
  misc_feature (33)..(34): n is a, c, g, or t
  misc_feature (43)..(44): n is a, c, g, or t
  misc_feature (53)..(54): n is a, c, g, or t
tttttttaagcagtggtatcaacgcagagtacnngctattcgnntacaggtcnntttttttttttttttttttttttttttttt

SEQ ID NO: 1430 - DNA, 84 bp, Artificial
  Barcode component
  misc_feature (33)..(34): n is a, c, g, or t
  misc_feature (43)..(44): n is a, c, g, or t
  misc_feature (53)..(54): n is a, c, g, or t
tttttttaagcagtggtatcaacgcagagtacnngctattcgnnctcacatgnntttttttttttttttttttttttttttttt

SEQ ID NO: 1431 - DNA, 84 bp, Artificial
  Barcode component
  misc_feature (33)..(34): n is a, c, g, or t
  misc_feature (43)..(44): n is a, c, g, or t
  misc_feature (53)..(54): n is a, c, g, or t
tttttttaagcagtggtatcaacgcagagtacnngctattcgnnactaggagnntttttttttttttttttttttttttttttt

SEQ ID NO: 1432 - DNA, 84 bp, Artificial
  Barcode component
  misc_feature (33)..(34): n is a, c, g, or t
  misc_feature (43)..(44): n is a, c, g, or t
  misc_feature (53)..(54): n is a, c, g, or t
tttttttaagcagtggtatcaacgcagagtacnngctattcgnnccatagganntttttttttttttttttttttttttttttt

SEQ ID NO: 1433 - DNA, 84 bp, Artificial
  Barcode component
  misc_feature (33)..(34): n is a, c, g, or t
  misc_feature (43)..(44): n is a, c, g, or t
  misc_feature (53)..(54): n is a, c, g, or t
tttttttaagcagtggtatcaacgcagagtacnngctattcgnnggagaatcnntttttttttttttttttttttttttttttt

SEQ ID NO: 1434 - DNA, 84 bp, Artificial
  Barcode component
  misc_feature (33)..(34): n is a, c, g, or t
  misc_feature (43)..(44): n is a, c, g, or t
  misc_feature (53)..(54): n is a, c, g, or t
tttttttaagcagtggtatcaacgcagagtacnngctattcgnngccaagaanntttttttttttttttttttttttttttttt

SEQ ID NO: 1435 - DNA, 84 bp, Artificial
  Barcode component
  misc_feature (33)..(34): n is a, c, g, or t
  misc_feature (43)..(44): n is a, c, g, or t
  misc_feature (53)..(54): n is a, c, g, or t
tttttttaagcagtggtatcaacgcagagtacnngctattcgnnaaggcaagnntttttttttttttttttttttttttttttt

SEQ ID NO: 1436 - DNA, 84 bp, Artificial
  Barcode component
  misc_feature (33)..(34): n is a, c, g, or t
  misc_feature (43)..(44): n is a, c, g, or t
  misc_feature (53)..(54): n is a, c, g, or t
tttttttaagcagtggtatcaacgcagagtacnngctattcgnnaatgtcgcnntttttttttttttttttttttttttttttt

SEQ ID NO: 1437 - DNA, 84 bp, Artificial
  Barcode component
  misc_feature (33)..(34): n is a, c, g, or t
  misc_feature (43)..(44): n is a, c, g, or t
  misc_feature (53)..(54): n is a, c, g, or t
tttttttaagcagtggtatcaacgcagagtacnngctattcgnnatggaaccnntttttttttttttttttttttttttttttt

SEQ ID NO: 1438 - DNA, 84 bp, Artificial
  Barcode component
  misc_feature (33)..(34): n is a, c, g, or t
  misc_feature (43)..(44): n is a, c, g, or t
  misc_feature (53)..(54): n is a, c, g, or t
tttttttaagcagtggtatcaacgcagagtacnngctattcgnnagaggcatnntttttttttttttttttttttttttttttt

SEQ ID NO: 1439 - DNA, 84 bp, Artificial
  Barcode component
  misc_feature (33)..(34): n is a, c, g, or t
  misc_feature (43)..(44): n is a, c, g, or t
  misc_feature (53)..(54): n is a, c, g, or t
tttttttaagcagtggtatcaacgcagagtacnngctattcgnntgcatagcnntttttttttttttttttttttttttttttt

SEQ ID NO: 1440 - DNA, 84 bp, Artificial
  Barcode component
  misc_feature (33)..(34): n is a, c, g, or t
  misc_feature (43)..(44): n is a, c, g, or t
  misc_feature (53)..(54): n is a, c, g, or t
tttttttaagcagtggtatcaacgcagagtacnngctattcgnnctaacgganntttttttttttttttttttttttttttttt

SEQ ID NO: 1441 - DNA, 84 bp, Artificial
  Barcode component
  misc_feature (33)..(34): n is a, c, g, or t
  misc_feature (43)..(44): n is a, c, g, or t
  misc_feature (53)..(54): n is a, c, g, or t
tttttttaagcagtggtatcaacgcagagtacnngctattcgnntatcgaggnntttttttttttttttttttttttttttttt

SEQ ID NO: 1442 - DNA, 84 bp, Artificial
  Barcode component
  misc_feature (33)..(34): n is a, c, g, or t
  misc_feature (43)..(44): n is a, c, g, or t
  misc_feature (53)..(54): n is a, c, g, or t
tttttttaagcagtggtatcaacgcagagtacnngctattcgnncatagcctnntttttttttttttttttttttttttttttt

SEQ ID NO: 1443 - DNA, 84 bp, Artificial
  Barcode component
  misc_feature (33)..(34): n is a, c, g, or t
  misc_feature (43)..(44): n is a, c, g, or t
  misc_feature (53)..(54): n is a, c, g, or t
tttttttaagcagtggtatcaacgcagagtacnngctattcgnnatcgagacnntttttttttttttttttttttttttttttt

SEQ ID NO: 1444 - DNA, 84 bp, Artificial
  Barcode component
  misc_feature (33)..(34): n is a, c, g, or t
  misc_feature (43)..(44): n is a, c, g, or t
  misc_feature (53)..(54): n is a, c, g, or t
tttttttaagcagtggtatcaacgcagagtacnngctattcgnnggaagagtnntttttttttttttttttttttttttttttt

SEQ ID NO: 1445 - DNA, 84 bp, Artificial
  Barcode component
  misc_feature (33)..(34): n is a, c, g, or t
  misc_feature (43)..(44): n is a, c, g, or t
  misc_feature (53)..(54): n is a, c, g, or t
tttttttaagcagtggtatcaacgcagagtacnngctattcgnnccaagtagnntttttttttttttttttttttttttttttt

SEQ ID NO: 1446 - DNA, 84 bp, Artificial
  Barcode component
  misc_feature (33)..(34): n is a, c, g, or t
  misc_feature (43)..(44): n is a, c, g, or t
  misc_feature (53)..(54): n is a, c, g, or t
tttttttaagcagtggtatcaacgcagagtacnngctattcgnnctgaacagnntttttttttttttttttttttttttttttt

SEQ ID NO: 1447 - DNA, 84 bp, Artificial
  Barcode component
  misc_feature (33)..(34): n is a, c, g, or t
  misc_feature (43)..(44): n is a, c, g, or t
  misc_feature (53)..(54): n is a, c, g, or t
tttttttaagcagtggtatcaacgcagagtacnngctattcgnngtaggttcnntttttttttttttttttttttttttttttt

SEQ ID NO: 1448 - DNA, 84 bp, Artificial
  Barcode component
  misc_feature (33)..(34): n is a, c, g, or t
  misc_feature (43)..(44): n is a, c, g, or t
  misc_feature (53)..(54): n is a, c, g, or t
tttttttaagcagtggtatcaacgcagagtacnngctattcgnngtatggacnntttttttttttttttttttttttttttttt

SEQ ID NO: 1449 - DNA, 84 bp, Artificial
  Barcode component
  misc_feature (33)..(34): n is a, c, g, or t
  misc_feature (43)..(44): n is a, c, g, or t
  misc_feature (53)..(54): n is a, c, g, or t
tttttttaagcagtggtatcaacgcagagtacnngctattcgnntcgcaacanntttttttttttttttttttttttttttttt

SEQ ID NO: 1450 - DNA, 84 bp, Artificial
  Barcode component
  misc_feature (33)..(34): n is a, c, g, or t
  misc_feature (43)..(44): n is a, c, g, or t
  misc_feature (53)..(54): n is a, c, g, or t
tttttttaagcagtggtatcaacgcagagtacnngctattcgnnccgctaatnntttttttttttttttttttttttttttttt

SEQ ID NO: 1451 - DNA, 84 bp, Artificial
  Barcode component
  misc_feature (33)..(34): n is a, c, g, or t
  misc_feature (43)..(44): n is a, c, g, or t
  misc_feature (53)..(54): n is a, c, g, or t
tttttttaagcagtggtatcaacgcagagtacnngctattcgnngattcgcanntttttttttttttttttttttttttttttt

SEQ ID NO: 1452 - DNA, 84 bp, Artificial
  Barcode component
  misc_feature (33)..(34): n is a, c, g, or t
  misc_feature (43)..(44): n is a, c, g, or t
  misc_feature (53)..(54): n is a, c, g, or t
tttttttaagcagtggtatcaacgcagagtacnngctattcgnncgatggaanntttttttttttttttttttttttttttttt

SEQ ID NO: 1453 - DNA, 84 bp, Artificial
  Barcode component
  misc_feature (33)..(34): n is a, c, g, or t
  misc_feature (43)..(44): n is a, c, g, or t
  misc_feature (53)..(54): n is a, c, g, or t
tttttttaagcagtggtatcaacgcagagtacnngctattcgnnagcaagganntttttttttttttttttttttttttttttt

SEQ ID NO: 1454 - DNA, 84 bp, Artificial
  Barcode component
  misc_feature (33)..(34): n is a, c, g, or t
  misc_feature (43)..(44): n is a, c, g, or t
  misc_feature (53)..(54): n is a, c, g, or t
tttttttaagcagtggtatcaacgcagagtacnngctattcgnncgtagcaanntttttttttttttttttttttttttttttt

SEQ ID NO: 1455 - DNA, 84 bp, Artificial
  Barcode component
  misc_feature (33)..(34): n is a, c, g, or t
  misc_feature (43)..(44): n is a, c, g, or t
  misc_feature (53)..(54): n is a, c, g, or t
tttttttaagcagtggtatcaacgcagagtacnngctattcgnntggcagtanntttttttttttttttttttttttttttttt

SEQ ID NO: 1456 - DNA, 84 bp, Artificial
  Barcode component
  misc_feature (33)..(34): n is a, c, g, or t
  misc_feature (43)..(44): n is a, c, g, or t
  misc_feature (53)..(54): n is a, c, g, or t
tttttttaagcagtggtatcaacgcagagtacnngctattcgnncggtagttnntttttttttttttttttttttttttttttt

SEQ ID NO: 1457 - DNA, 84 bp, Artificial
  Barcode component
  misc_feature (33)..(34): n is a, c, g, or t
  misc_feature (43)..(44): n is a, c, g, or t
  misc_feature (53)..(54): n is a, c, g, or t
tttttttaagcagtggtatcaacgcagagtacnngctattcgnntgacttcgnntttttttttttttttttttttttttttttt

SEQ ID NO: 1458 - DNA, 84 bp, Artificial
  Barcode component
  misc_feature (33)..(34): n is a, c, g, or t
  misc_feature (43)..(44): n is a, c, g, or t
  misc_feature (53)..(54): n is a, c, g, or t
tttttttaagcagtggtatcaacgcagagtacnngctattcgnngagtgcaanntttttttttttttttttttttttttttttt

SEQ ID NO: 1459 - DNA, 84 bp, Artificial
  Barcode component
  misc_feature (33)..(34): n is a, c, g, or t
  misc_feature (43)..(44): n is a, c, g, or t
  misc_feature (53)..(54): n is a, c, g, or t
tttttttaagcagtggtatcaacgcagagtacnngctattcgnnacggtaacnntttttttttttttttttttttttttttttt

SEQ ID NO: 1460 - DNA, 84 bp, Artificial
  Barcode component
  misc_feature (33)..(34): n is a, c, g, or t
  misc_feature (43)..(44): n is a, c, g, or t
  misc_feature (53)..(54): n is a, c, g, or t
tttttttaagcagtggtatcaacgcagagtacnngctattcgnnaagtggtgnntttttttttttttttttttttttttttttt

SEQ ID NO: 1461 - DNA, 84 bp, Artificial
  Barcode component
  misc_feature (33)..(34): n is a, c, g, or t
  misc_feature (43)..(44): n is a, c, g, or t
  misc_feature (53)..(54): n is a, c, g, or t
tttttttaagcagtggtatcaacgcagagtacnngctattcgnnggagacaanntttttttttttttttttttttttttttttt

SEQ ID NO: 1462 - DNA, 84 bp, Artificial
  Barcode component
  misc_feature (33)..(34): n is a, c, g, or t
  misc_feature (43)..(44): n is a, c, g, or t
  misc_feature (53)..(54): n is a, c, g, or t
tttttttaagcagtggtatcaacgcagagtacnngctattcgnntcaaggacnntttttttttttttttttttttttttttttt

SEQ ID NO: 1463 - DNA, 84 bp, Artificial
  Barcode component
  misc_feature (33)..(34): n is a, c, g, or t
  misc_feature (43)..(44): n is a, c, g, or t
  misc_feature (53)..(54): n is a, c, g, or t
tttttttaagcagtggtatcaacgcagagtacnngctattcgnnaagagagcnntttttttttttttttttttttttttttttt

SEQ ID NO: 1464 - DNA, 84 bp, Artificial
  Barcode component
  misc_feature (33)..(34): n is a, c, g, or t
  misc_feature (43)..(44): n is a, c, g, or t
  misc_feature (53)..(54): n is a, c, g, or t
tttttttaagcagtggtatcaacgcagagtacnngctattcgnncgagagatnntttttttttttttttttttttttttttttt

SEQ ID NO: 1465 - DNA, 84 bp, Artificial
  Barcode component
  misc_feature (33)..(34): n is a, c, g, or t
  misc_feature (43)..(44): n is a, c, g, or t
  misc_feature (53)..(54): n is a, c, g, or t
tttttttaagcagtggtatcaacgcagagtacnngctattcgnnacagatggnntttttttttttttttttttttttttttttt

SEQ ID NO: 1466 - DNA, 84 bp, Artificial
  Barcode component
  misc_feature (33)..(34): n is a, c, g, or t
  misc_feature (43)..(44): n is a, c, g, or t
  misc_feature (53)..(54): n is a, c, g, or t
tttttttaagcagtggtatcaacgcagagtacnngctattcgnnaggagtcanntttttttttttttttttttttttttttttt

SEQ ID NO: 1467 - DNA, 84 bp, Artificial
  Barcode component
  misc_feature (33)..(34): n is a, c, g, or t
  misc_feature (43)..(44): n is a, c, g, or t
  misc_feature (53)..(54): n is a, c, g, or t
tttttttaagcagtggtatcaacgcagagtacnngctattcgnncgtgttacnntttttttttttttttttttttttttttttt

SEQ ID NO: 1468 - DNA, 84 bp, Artificial
  Barcode component
  misc_feature (33)..(34): n is a, c, g, or t
  misc_feature (43)..(44): n is a, c, g, or t
  misc_feature (53)..(54): n is a, c, g, or t
tttttttaagcagtggtatcaacgcagagtacnngctattcgnntagtgtgcnntttttttttttttttttttttttttttttt

SEQ ID NO: 1469 - DNA, 84 bp, Artificial
  Barcode component
  misc_feature (33)..(34): n is a, c, g, or t
  misc_feature (43)..(44): n is a, c, g, or t
  misc_feature (53)..(54): n is a, c, g, or t
tttttttaagcagtggtatcaacgcagagtacnngctattcgnnctcatgacnntttttttttttttttttttttttttttttt

SEQ ID NO: 1470 - DNA, 84 bp, Artificial
  Barcode component
  misc_feature (33)..(34): n is a, c, g, or t
  misc_feature (43)..(44): n is a, c, g, or t
  misc_feature (53)..(54): n is a, c, g, or t
tttttttaagcagtggtatcaacgcagagtacnngctattcgnngtatccagnntttttttttttttttttttttttttttttt

SEQ ID NO: 1471 - DNA, 84 bp, Artificial
  Barcode component
  misc_feature (33)..(34): n is a, c, g, or t
  misc_feature (43)..(44): n is a, c, g, or t
  misc_feature (53)..(54): n is a, c, g, or t
tttttttaagcagtggtatcaacgcagagtacnngctattcgnnacgcctatnntttttttttttttttttttttttttttttt

SEQ ID NO: 1472 - DNA, 84 bp, Artificial
  Barcode component
  misc_feature (33)..(34): n is a, c, g, or t
  misc_feature (43)..(44): n is a, c, g, or t
  misc_feature (53)..(54): n is a, c, g, or t
tttttttaagcagtggtatcaacgcagagtacnngctattcgnnaacgacctnntttttttttttttttttttttttttttttt

SEQ ID NO: 1473 - DNA, 84 bp, Artificial
  Barcode component
  misc_feature (33)..(34): n is a, c, g, or t
  misc_feature (43)..(44): n is a, c, g, or t
  misc_feature (53)..(54): n is a, c, g, or t
tttttttaagcagtggtatcaacgcagagtacnngctattcgnnatcaggctnntttttttttttttttttttttttttttttt

SEQ ID NO: 1474 - DNA, 84 bp, Artificial
  Barcode component
  misc_feature (33)..(34): n is a, c, g, or t
  misc_feature (43)..(44): n is a, c, g, or t
  misc_feature (53)..(54): n is a, c, g, or t
tttttttaagcagtggtatcaacgcagagtacnngctattcgnncaagttcgnntttttttttttttttttttttttttttttt

SEQ ID NO: 1475 - DNA, 84 bp, Artificial
  Barcode component
  misc_feature (33)..(34): n is a, c, g, or t
  misc_feature (43)..(44): n is a, c, g, or t
  misc_feature (53)..(54): n is a, c, g, or t
tttttttaagcagtggtatcaacgcagagtacnngctattcgnntagccaganntttttttttttttttttttttttttttttt

SEQ ID NO: 1476 - DNA, 84 bp, Artificial
  Barcode component
  misc_feature (33)..(34): n is a, c, g, or t
  misc_feature (43)..(44): n is a, c, g, or t
  misc_feature (53)..(54): n is a, c, g, or t
tttttttaagcagtggtatcaacgcagagtacnngctattcgnncaatcacgnntttttttttttttttttttttttttttttt

SEQ ID NO: 1477 - DNA, 84 bp, Artificial
  Barcode component
  misc_feature (33)..(34): n is a, c, g, or t
  misc_feature (43)..(44): n is a, c, g, or t
  misc_feature (53)..(54): n is a, c, g, or t
tttttttaagcagtggtatcaacgcagagtacnngctattcgnngcaacaagnntttttttttttttttttttttttttttttt

SEQ ID NO: 1478 - DNA, 84 bp, Artificial
  Barcode component
  misc_feature (33)..(34): n is a, c, g, or t
  misc_feature (43)..(44): n is a, c, g, or t
  misc_feature (53)..(54): n is a, c, g, or t
tttttttaagcagtggtatcaacgcagagtacnngctattcgnncacgacaanntttttttttttttttttttttttttttttt

SEQ ID NO: 1479 - DNA, 84 bp, Artificial
  Barcode component
  misc_feature (33)..(34): n is a, c, g, or t
  misc_feature (43)..(44): n is a, c, g, or t
  misc_feature (53)..(54): n is a, c, g, or t
tttttttaagcagtggtatcaacgcagagtacnngctattcgnntacggaganntttttttttttttttttttttttttttttt

SEQ ID NO: 1480 - DNA, 84 bp, Artificial
  Barcode component
  misc_feature (33)..(34): n is a, c, g, or t
  misc_feature (43)..(44): n is a, c, g, or t
  misc_feature (53)..(54): n is a, c, g, or t
tttttttaagcagtggtatcaacgcagagtacnngctattcgnncgacaaganntttttttttttttttttttttttttttttt

SEQ ID NO: 1481 - DNA, 84 bp, Artificial
  Barcode component
  misc_feature (33)..(34): n is a, c, g, or t
  misc_feature (43)..(44): n is a, c, g, or t
  misc_feature (53)..(54): n is a, c, g, or t
tttttttaagcagtggtatcaacgcagagtacnngctattcgnncgaagtganntttttttttttttttttttttttttttttt

SEQ ID NO: 1482 - DNA, 84 bp, Artificial
  Barcode component
  misc_feature (33)..(34): n is a, c, g, or t
  misc_feature (43)..(44): n is a, c, g, or t
  misc_feature (53)..(54): n is a, c, g, or t
tttttttaagcagtggtatcaacgcagagtacnngctattcgnnagctggtanntttttttttttttttttttttttttttttt

SEQ ID NO: 1483 - DNA, 84 bp, Artificial
  Barcode component
  misc_feature (33)..(34): n is a, c, g, or t
  misc_feature (43)..(44): n is a, c, g, or t
  misc_feature (53)..(54): n is a, c, g, or t
tttttttaagcagtggtatcaacgcagagtacnngctattcgnnaactaggcnntttttttttttttttttttttttttttttt

SEQ ID NO: 1484 - DNA, 84 bp, Artificial
  Barcode component
  misc_feature (33)..(34): n is a, c, g, or t
  misc_feature (43)..(44): n is a, c, g, or t
  misc_feature (53)..(54): n is a, c, g, or t
tttttttaagcagtggtatcaacgcagagtacnngctattcgnncagcaagtnntttttttttttttttttttttttttttttt

SEQ ID NO: 1485 - DNA, 84 bp, Artificial
  Barcode component
  misc_feature (33)..(34): n is a, c, g, or t
  misc_feature (43)..(44): n is a, c, g, or t
  misc_feature (53)..(54): n is a, c, g, or t
tttttttaagcagtggtatcaacgcagagtacnngctattcgnnacgaggtanntttttttttttttttttttttttttttttt

SEQ ID NO: 1486 - DNA, 84 bp, Artificial
  Barcode component
  misc_feature (33)..(34): n is a, c, g, or t
  misc_feature (43)..(44): n is a, c, g, or t
  misc_feature (53)..(54): n is a, c, g, or t
tttttttaagcagtggtatcaacgcagagtacnngctattcgnncatcttccnntttttttttttttttttttttttttttttt

SEQ ID NO: 1487 - DNA, 84 bp, Artificial
  Barcode component
  misc_feature (33)..(34): n is a, c, g, or t
  misc_feature (43)..(44): n is a, c, g, or t
  misc_feature (53)..(54): n is a, c, g, or t
tttttttaagcagtggtatcaacgcagagtacnngctattcgnncctgaatcnntttttttttttttttttttttttttttttt

SEQ ID NO: 1488 - DNA, 84 bp, Artificial
  Barcode component
  misc_feature (33)..(34): n is a, c, g, or t
  misc_feature (43)..(44): n is a, c, g, or t
  misc_feature (53)..(54): n is a, c, g, or t
tttttttaagcagtggtatcaacgcagagtacnngctattcgnntgcagactnntttttttttttttttttttttttttttttt

SEQ ID NO: 1489 - DNA, 84 bp, Artificial
  Barcode component
  misc_feature (33)..(34): n is a, c, g, or t
  misc_feature (43)..(44): n is a, c, g, or t
  misc_feature (53)..(54): n is a, c, g, or t
tttttttaagcagtggtatcaacgcagagtacnngctattcgnnagatgtggnntttttttttttttttttttttttttttttt

SEQ ID NO: 1490 - DNA, 84 bp, Artificial
  Barcode component
  misc_feature (33)..(34): n is a, c, g, or t
  misc_feature (43)..(44): n is a, c, g, or t
  misc_feature (53)..(54): n is a, c, g, or t
tttttttaagcagtggtatcaacgcagagtacnngctattcgnnagttcgacnntttttttttttttttttttttttttttttt

SEQ ID NO: 1491 - DNA, 84 bp, Artificial
  Barcode component
  misc_feature (33)..(34): n is a, c, g, or t
  misc_feature (43)..(44): n is a, c, g, or t
  misc_feature (53)..(54): n is a, c, g, or t
tttttttaagcagtggtatcaacgcagagtacnngctattcgnnacaacctcnntttttttttttttttttttttttttttttt

SEQ ID NO: 1492 - DNA, 84 bp, Artificial
  Barcode component
  misc_feature (33)..(34): n is a, c, g, or t
  misc_feature (43)..(44): n is a, c, g, or t
  misc_feature (53)..(54): n is a, c, g, or t
tttttttaagcagtggtatcaacgcagagtacnngctattcgnncatggtagnntttttttttttttttttttttttttttttt

SEQ ID NO: 1493 - DNA, 84 bp, Artificial
  Barcode component
  misc_feature (33)..(34): n is a, c, g, or t
  misc_feature (43)..(44): n is a, c, g, or t
  misc_feature (53)..(54): n is a, c, g, or t
tttttttaagcagtggtatcaacgcagagtacnngctattcgnncgtatctcnntttttttttttttttttttttttttttttt

SEQ ID NO: 1494 - DNA, 84 bp, Artificial
  Barcode component
  misc_feature (33)..(34): n is a, c, g, or t
  misc_feature (43)..(44): n is a, c, g, or t
  misc_feature (53)..(54): n is a, c, g, or t
tttttttaagcagtggtatcaacgcagagtacnngctattcgnncctagttcnntttttttttttttttttttttttttttttt

SEQ ID NO: 1495 - DNA, 84 bp, Artificial
  Barcode component
  misc_feature (33)..(34): n is a, c, g, or t
  misc_feature (43)..(44): n is a, c, g, or t
  misc_feature (53)..(54): n is a, c, g, or t
tttttttaagcagtggtatcaacgcagagtacnngctattcgnncaagagtcnntttttttttttttttttttttttttttttt

SEQ ID NO: 1496 - DNA, 84 bp, Artificial
  Barcode component
  misc_feature (33)..(34): n is a, c, g, or t
  misc_feature (43)..(44): n is a, c, g, or t
  misc_feature (53)..(54): n is a, c, g, or t
tttttttaagcagtggtatcaacgcagagtacnnagcctaacnnaatcggcanntttttttttttttttttttttttttttttt

SEQ ID NO: 1497 - DNA, 84 bp, Artificial
  Barcode component
  misc_feature (33)..(34): n is a, c, g, or t
  misc_feature (43)..(44): n is a, c, g, or t
  misc_feature (53)..(54): n is a, c, g, or t
tttttttaagcagtggtatcaacgcagagtacnnagcctaacnntacggcatnntttttttttttttttttttttttttttttt

SEQ ID NO: 1498 - DNA, 84 bp, Artificial
  Barcode component
  misc_feature (33)..(34): n is a, c, g, or t
  misc_feature (43)..(44): n is a, c, g, or t
  misc_feature (53)..(54): n is a, c, g, or t
tttttttaagcagtggtatcaacgcagagtacnnagcctaacnnttggatcgnntttttttttttttttttttttttttttttt

SEQ ID NO: 1499 - DNA, 84 bp, Artificial
  Barcode component
  misc_feature (33)..(34): n is a, c, g, or t
  misc_feature (43)..(44): n is a, c, g, or t
  misc_feature (53)..(54): n is a, c, g, or t
tttttttaagcagtggtatcaacgcagagtacnnagcctaacnntggaacganntttttttttttttttttttttttttttttt

SEQ ID NO: 1500 - DNA, 84 bp, Artificial
  Barcode component
  misc_feature (33)..(34): n is a, c, g, or t
  misc_feature (43)..(44): n is a, c, g, or t
  misc_feature (53)..(54): n is a, c, g, or t
tttttttaagcagtggtatcaacgcagagtacnnagcctaacnnggcaatcanntttttttttttttttttttttttttttttt

SEQ ID NO: 1501 - DNA, 84 bp, Artificial
  Barcode component
  misc_feature (33)..(34): n is a, c, g, or t
  misc_feature (43)..(44): n is a, c, g, or t
  misc_feature (53)..(54): n is a, c, g, or t
tttttttaagcagtggtatcaacgcagagtacnnagcctaacnngaatccganntttttttttttttttttttttttttttttt

SEQ ID NO: 1502 - DNA, 84 bp, Artificial
  Barcode component
  misc_feature (33)..(34): n is a, c, g, or t
  misc_feature (43)..(44): n is a, c, g, or t
  misc_feature (53)..(54): n is a, c, g, or t
tttttttaagcagtggtatcaacgcagagtacnnagcctaacnnttacggtgnntttttttttttttttttttttttttttttt

SEQ ID NO: 1503 - DNA, 84 bp, Artificial
  Barcode component
  misc_feature (33)..(34): n is a, c, g, or t
  misc_feature (43)..(44): n is a, c, g, or t
  misc_feature (53)..(54): n is a, c, g, or t
tttttttaagcagtggtatcaacgcagagtacnnagcctaacnncatatcggnntttttttttttttttttttttttttttttt

SEQ ID NO: 1504 - DNA, 84 bp, Artificial
  Barcode component
  misc_feature (33)..(34): n is a, c, g, or t
  misc_feature (43)..(44): n is a, c, g, or t
  misc_feature (53)..(54): n is a, c, g, or t
tttttttaagcagtggtatcaacgcagagtacnnagcctaacnncttcggtanntttttttttttttttttttttttttttttt

SEQ ID NO: 1505 - DNA, 84 bp, Artificial
  Barcode component
  misc_feature (33)..(34): n is a, c, g, or t
  misc_feature (43)..(44): n is a, c, g, or t
  misc_feature (53)..(54): n is a, c, g, or t
tttttttaagcagtggtatcaacgcagagtacnnagcctaacnntcctaacgnntttttttttttttttttttttttttttttt

SEQ ID NO: 1506 - DNA, 84 bp, Artificial
  Barcode component
  misc_feature (33)..(34): n is a, c, g, or t
  misc_feature (43)..(44): n is a, c, g, or t
  misc_feature (53)..(54): n is a, c, g, or t
tttttttaagcagtggtatcaacgcagagtacnnagcctaacnngtaagccanntttttttttttttttttttttttttttttt

SEQ ID NO: 1507 - DNA, 84 bp, Artificial
  Barcode component
  misc_feature (33)..(34): n is a, c, g, or t
  misc_feature (43)..(44): n is a, c, g, or t
  misc_feature (53)..(54): n is a, c, g, or t
tttttttaagcagtggtatcaacgcagagtacnnagcctaacnntaaggtggnntttttttttttttttttttttttttttttt

SEQ ID NO: 1508 - DNA, 84 bp, Artificial
  Barcode component
  misc_feature (33)..(34): n is a, c, g, or t
  misc_feature (43)..(44): n is a, c, g, or t
  misc_feature (53)..(54): n is a, c, g, or t
tttttttaagcagtggtatcaacgcagagtacnnagcctaacnnggtaagctnntttttttttttttttttttttttttttttt

SEQ ID NO: 1509 - DNA, 84 bp, Artificial
  Barcode component
  misc_feature (33)..(34): n is a, c, g, or t
  misc_feature (43)..(44): n is a, c, g, or t
  misc_feature (53)..(54): n is a, c, g, or t
tttttttaagcagtggtatcaacgcagagtacnnagcctaacnntgtgtcganntttttttttttttttttttttttttttttt

SEQ ID NO: 1510 - DNA, 84 bp, Artificial
  Barcode component
  misc_feature (33)..(34): n is a, c, g, or t
  misc_feature (43)..(44): n is a, c, g, or t
  misc_feature (53)..(54): n is a, c, g, or t
tttttttaagcagtggtatcaacgcagagtacnnagcctaacnngagcatganntttttttttttttttttttttttttttttt

SEQ ID NO: 1511 - DNA, 84 bp, Artificial
  Barcode component
  misc_feature (33)..(34): n is a, c, g, or t
  misc_feature (43)..(44): n is a, c, g, or t
  misc_feature (53)..(54): n is a, c, g, or t
tttttttaagcagtggtatcaacgcagagtacnnagcctaacnntcgaagtcnntttttttttttttttttttttttttttttt

SEQ ID NO: 1512 - DNA, 84 bp, Artificial
  Barcode component
  misc_feature (33)..(34): n is a, c, g, or t
  misc_feature (43)..(44): n is a, c, g, or t
  misc_feature (53)..(54): n is a, c, g, or t
tttttttaagcagtggtatcaacgcagagtacnnagcctaacnnggtgaacanntttttttttttttttttttttttttttttt

SEQ ID NO: 1513 - DNA, 84 bp, Artificial
  Barcode component
  misc_feature (33)..(34): n is a, c, g, or t
  misc_feature (43)..(44): n is a, c, g, or t
  misc_feature (53)..(54): n is a, c, g, or t
tttttttaagcagtggtatcaacgcagagtacnnagcctaacnnacatgcacnntttttttttttttttttttttttttttttt

SEQ ID NO: 1514 - DNA, 84 bp, Artificial
  Barcode component
  misc_feature (33)..(34): n is a, c, g, or t
  misc_feature (43)..(44): n is a, c, g, or t
  misc_feature (53)..(54): n is a, c, g, or t
tttttttaagcagtggtatcaacgcagagtacnnagcctaacnnccaacagtnntttttttttttttttttttttttttttttt

SEQ ID NO: 1515 - DNA, 84 bp, Artificial
  Barcode component
  misc_feature (33)..(34): n is a, c, g, or t
  misc_feature (43)..(44): n is a, c, g, or t
  misc_feature (53)..(54): n is a, c, g, or t
tttttttaagcagtggtatcaacgcagagtacnnagcctaacnnagaacagcnntttttttttttttttttttttttttttttt

SEQ ID NO: 1516 - DNA, 84 bp, Artificial
  Barcode component
  misc_feature (33)..(34): n is a, c, g, or t
  misc_feature (43)..(44): n is a, c, g, or t
  misc_feature (53)..(54): n is a, c, g, or t
tttttttaagcagtggtatcaacgcagagtacnnagcctaacnngaacacgtnntttttttttttttttttttttttttttttt

SEQ ID NO: 1517 - DNA, 84 bp, Artificial
  Barcode component
  misc_feature (33)..(34): n is a, c, g, or t
  misc_feature (43)..(44): n is a, c, g, or t
  misc_feature (53)..(54): n is a, c, g, or t
tttttttaagcagtggtatcaacgcagagtacnnagcctaacnnggtcttcanntttttttttttttttttttttttttttttt

SEQ ID NO: 1518 - DNA, 84 bp, Artificial
  Barcode component
  misc_feature (33)..(34): n is a, c, g, or t
  misc_feature (43)..(44): n is a, c, g, or t
  misc_feature (53)..(54): n is a, c, g, or t
tttttttaagcagtggtatcaacgcagagtacnnagcctaacnnaggttcagnntttttttttttttttttttttttttttttt

SEQ ID NO: 1519 - DNA, 84 bp, Artificial
  Barcode component
  misc_feature (33)..(34): n is a, c, g, or t
  misc_feature (43)..(44): n is a, c, g, or t
  misc_feature (53)..(54): n is a, c, g, or t
tttttttaagcagtggtatcaacgcagagtacnnagcctaacnnctagagcanntttttttttttttttttttttttttttttt

SEQ ID NO: 1520 - DNA, 84 bp, Artificial
  Barcode component
  misc_feature (33)..(34): n is a, c, g, or t
  misc_feature (43)..(44): n is a, c, g, or t
  misc_feature (53)..(54): n is a, c, g, or t
tttttttaagcagtggtatcaacgcagagtacnnagcctaacnncttctagcnntttttttttttttttttttttttttttttt

SEQ ID NO: 1521 - DNA, 84 bp, Artificial
  Barcode component
  misc_feature (33)..(34): n is a, c, g, or t
  misc_feature (43)..(44): n is a, c, g, or t
  misc_feature (53)..(54): n is a, c, g, or t
tttttttaagcagtggtatcaacgcagagtacnnagcctaacnngagtaacgnntttttttttttttttttttttttttttttt

SEQ ID NO: 1522 - DNA, 84 bp, Artificial
  Barcode component
  misc_feature (33)..(34): n is a, c, g, or t
  misc_feature (43)..(44): n is a, c, g, or t
  misc_feature (53)..(54): n is a, c, g, or t
tttttttaagcagtggtatcaacgcagagtacnnagcctaacnnctaagaggnntttttttttttttttttttttttttttttt

SEQ ID NO: 1523 - DNA, 84 bp, Artificial
  Barcode component
  misc_feature (33)..(34): n is a, c, g, or t
  misc_feature (43)..(44): n is a, c, g, or t
  misc_feature (53)..(54): n is a, c, g, or t
tttttttaagcagtggtatcaacgcagagtacnnagcctaacnnacgtgtagnntttttttttttttttttttttttttttttt

SEQ ID NO: 1524 - DNA, 84 bp, Artificial
  Barcode component
  misc_feature (33)..(34): n is a, c, g, or t
  misc_feature (43)..(44): n is a, c, g, or t
  misc_feature (53)..(54): n is a, c, g, or t
tttttttaagcagtggtatcaacgcagagtacnnagcctaacnnactacaggnntttttttttttttttttttttttttttttt

SEQ ID NO: 1525 - DNA, 84 bp, Artificial
  Barcode component
  misc_feature (33)..(34): n is a, c, g, or t
  misc_feature (43)..(44): n is a, c, g, or t
  misc_feature (53)..(54): n is a, c, g, or t
tttttttaagcagtggtatcaacgcagagtacnnagcctaacnntacaggtcnntttttttttttttttttttttttttttttt

SEQ ID NO: 1526 - DNA, 84 bp, Artificial
  Barcode component
  misc_feature (33)..(34): n is a, c, g, or t
  misc_feature (43)..(44): n is a, c, g, or t
  misc_feature (53)..(54): n is a, c, g, or t
tttttttaagcagtggtatcaacgcagagtacnnagcctaacnnctcacatgnntttttttttttttttttttttttttttttt

SEQ ID NO: 1527 - DNA, 84 bp, Artificial
  Barcode component
  misc_feature (33)..(34): n is a, c, g, or t
  misc_feature (43)..(44): n is a, c, g, or t
  misc_feature (53)..(54): n is a, c, g, or t
tttttttaagcagtggtatcaacgcagagtacnnagcctaacnnactaggagnntttttttttttttttttttttttttttttt

SEQ ID NO: 1528 - DNA, 84 bp, Artificial
  Barcode component
  misc_feature (33)..(34): n is a, c, g, or t
  misc_feature (43)..(44): n is a, c, g, or t
  misc_feature (53)..(54): n is a, c, g, or t
tttttttaagcagtggtatcaacgcagagtacnnagcctaacnnccatagganntttttttttttttttttttttttttttttt

SEQ ID NO: 1529 - DNA, 84 bp, Artificial
  Barcode component
  misc_feature (33)..(34): n is a, c, g, or t
  misc_feature (43)..(44): n is a, c, g, or t
  misc_feature (53)..(54): n is a, c, g, or t
tttttttaagcagtggtatcaacgcagagtacnnagcctaacnnggagaatcnntttttttttttttttttttttttttttttt

SEQ ID NO: 1530 - DNA, 84 bp, Artificial
  Barcode component
  misc_feature (33)..(34): n is a, c, g, or t
  misc_feature (43)..(44): n is a, c, g, or t
  misc_feature (53)..(54): n is a, c, g, or t
tttttttaagcagtggtatcaacgcagagtacnnagcctaacnngccaagaanntttttttttttttttttttttttttttttt

SEQ ID NO: 1531 - DNA, 84 bp, Artificial
  Barcode component
  misc_feature (33)..(34): n is a, c, g, or t
  misc_feature (43)..(44): n is a, c, g, or t
  misc_feature (53)..(54): n is a, c, g, or t
tttttttaagcagtggtatcaacgcagagtacnnagcctaacnnaaggcaagnntttttttttttttttttttttttttttttt

SEQ ID NO: 1532 - DNA, 84 bp, Artificial
  Barcode component
  misc_feature (33)..(34): n is a, c, g, or t
  misc_feature (43)..(44): n is a, c, g, or t
  misc_feature (53)..(54): n is a, c, g, or t
tttttttaagcagtggtatcaacgcagagtacnnagcctaacnnaatgtcgcnntttttttttttttttttttttttttttttt

SEQ ID NO: 1533 - DNA, 84 bp, Artificial
  Barcode component
  misc_feature (33)..(34): n is a, c, g, or t
  misc_feature (43)..(44): n is a, c, g, or t
  misc_feature (53)..(54): n is a, c, g, or t
tttttttaagcagtggtatcaacgcagagtacnnagcctaacnnatggaaccnntttttttttttttttttttttttttttttt

SEQ ID NO: 1534 - DNA, 84 bp, Artificial
  Barcode component
  misc_feature (33)..(34): n is a, c, g, or t
  misc_feature (43)..(44): n is a, c, g, or t
  misc_feature (53)..(54): n is a, c, g, or t
tttttttaagcagtggtatcaacgcagagtacnnagcctaacnnagaggcatnntttttttttttttttttttttttttttttt

SEQ ID NO: 1535 - DNA, 84 bp, Artificial
  Barcode component
  misc_feature (33)..(34): n is a, c, g, or t
  misc_feature (43)..(44): n is a, c, g, or t
  misc_feature (53)..(54): n is a, c, g, or t
tttttttaagcagtggtatcaacgcagagtacnnagcctaacnntgcatagcnntttttttttttttttttttttttttttttt

SEQ ID NO: 1536 - DNA, 84 bp, Artificial
  Barcode component
  misc_feature (33)..(34): n is a, c, g, or t
  misc_feature (43)..(44): n is a, c, g, or t
  misc_feature (53)..(54): n is a, c, g, or t
tttttttaagcagtggtatcaacgcagagtacnnagcctaacnnctaacgganntttttttttttttttttttttttttttttt

SEQ ID NO: 1537 - DNA, 84 bp, Artificial
  Barcode component
  misc_feature (33)..(34): n is a, c, g, or t
  misc_feature (43)..(44): n is a, c, g, or t
  misc_feature (53)..(54): n is a, c, g, or t
tttttttaagcagtggtatcaacgcagagtacnnagcctaacnntatcgaggnntttttttttttttttttttttttttttttt

SEQ ID NO: 1538 - DNA, 84 bp, Artificial
  Barcode component
  misc_feature (33)..(34): n is a, c, g, or t
  misc_feature (43)..(44): n is a, c, g, or t
  misc_feature (53)..(54): n is a, c, g, or t
tttttttaagcagtggtatcaacgcagagtacnnagcctaacnncatagcctnntttttttttttttttttttttttttttttt

SEQ ID NO: 1539 - DNA, 84 bp, Artificial
  Barcode component
  misc_feature (33)..(34): n is a, c, g, or t
  misc_feature (43)..(44): n is a, c, g, or t
  misc_feature (53)..(54): n is a, c, g, or t
tttttttaagcagtggtatcaacgcagagtacnnagcctaacnnatcgagacnntttttttttttttttttttttttttttttt

SEQ ID NO: 1540 - DNA, 84 bp, Artificial
  Barcode component
  misc_feature (33)..(34): n is a, c, g, or t
  misc_feature (43)..(44): n is a, c, g, or t
  misc_feature (53)..(54): n is a, c, g, or t
tttttttaagcagtggtatcaacgcagagtacnnagcctaacnnggaagagtnntttttttttttttttttttttttttttttt

SEQ ID NO: 1541 - DNA, 84 bp, Artificial
  Barcode component
  misc_feature (33)..(34): n is a, c, g, or t
  misc_feature (43)..(44): n is a, c, g, or t
  misc_feature (53)..(54): n is a, c, g, or t
tttttttaagcagtggtatcaacgcagagtacnnagcctaacnnccaagtagnntttttttttttttttttttttttttttttt

SEQ ID NO: 1542 - DNA, 84 bp, Artificial
  Barcode component
  misc_feature (33)..(34): n is a, c, g, or t
  misc_feature (43)..(44): n is a, c, g, or t
  misc_feature (53)..(54): n is a, c, g, or t
tttttttaagcagtggtatcaacgcagagtacnnagcctaacnnctgaacagnntttttttttttttttttttttttttttttt

SEQ ID NO: 1543 - DNA, 84 bp, Artificial
  Barcode component
  misc_feature (33)..(34): n is a, c, g, or t
  misc_feature (43)..(44): n is a, c, g, or t
  misc_feature (53)..(54): n is a, c, g, or t
tttttttaagcagtggtatcaacgcagagtacnnagcctaacnngtaggttcnntttttttttttttttttttttttttttttt

SEQ ID NO: 1544 - DNA, 84 bp, Artificial
  Barcode component
  misc_feature (33)..(34): n is a, c, g, or t
  misc_feature (43)..(44): n is a, c, g, or t
  misc_feature (53)..(54): n is a, c, g, or t
tttttttaagcagtggtatcaacgcagagtacnnagcctaacnngtatggacnntttttttttttttttttttttttttttttt

SEQ ID NO: 1545 - DNA, 84 bp, Artificial
  Barcode component
  misc_feature (33)..(34): n is a, c, g, or t
  misc_feature (43)..(44): n is a, c, g, or t
  misc_feature (53)..(54): n is a, c, g, or t
tttttttaagcagtggtatcaacgcagagtacnnagcctaacnntcgcaacanntttttttttttttttttttttttttttttt

SEQ ID NO: 1546 - DNA, 84 bp, Artificial
  Barcode component
  misc_feature (33)..(34): n is a, c, g, or t
  misc_feature (43)..(44): n is a, c, g, or t
  misc_feature (53)..(54): n is a, c, g, or t
tttttttaagcagtggtatcaacgcagagtacnnagcctaacnnccgctaatnntttttttttttttttttttttttttttttt

SEQ ID NO: 1547 - DNA, 84 bp, Artificial
  Barcode component
  misc_feature (33)..(34): n is a, c, g, or t
  misc_feature (43)..(44): n is a, c, g, or t
  misc_feature (53)..(54): n is a, c, g, or t
tttttttaagcagtggtatcaacgcagagtacnnagcctaacnngattcgcanntttttttttttttttttttttttttttttt

SEQ ID NO: 1548 - DNA, 84 bp, Artificial
  Barcode component
  misc_feature (33)..(34): n is a, c, g, or t
  misc_feature (43)..(44): n is a, c, g, or t
  misc_feature (53)..(54): n is a, c, g, or t
tttttttaagcagtggtatcaacgcagagtacnnagcctaacnncgatggaanntttttttttttttttttttttttttttttt

SEQ ID NO: 1549 - DNA, 84 bp, Artificial
  Barcode component
  misc_feature (33)..(34): n is a, c, g, or t
  misc_feature (43)..(44): n is a, c, g, or t
  misc_feature (53)..(54): n is a, c, g, or t
tttttttaagcagtggtatcaacgcagagtacnnagcctaacnnagcaagganntttttttttttttttttttttttttttttt

SEQ ID NO: 1550 - DNA, 84 bp, Artificial
  Barcode component
  misc_feature (33)..(34): n is a, c, g, or t
  misc_feature (43)..(44): n is a, c, g, or t
  misc_feature (53)..(54): n is a, c, g, or t
tttttttaagcagtggtatcaacgcagagtacnnagcctaacnncgtagcaanntttttttttttttttttttttttttttttt

SEQ ID NO: 1551 - DNA, 84 bp, Artificial
  Barcode component
  misc_feature (33)..(34): n is a, c, g, or t
  misc_feature (43)..(44): n is a, c, g, or t
  misc_feature (53)..(54): n is a, c, g, or t
tttttttaagcagtggtatcaacgcagagtacnnagcctaacnntggcagtanntttttttttttttttttttttttttttttt

SEQ ID NO: 1552 - DNA, 84 bp, Artificial
  Barcode component
  misc_feature (33)..(34): n is a, c, g, or t
  misc_feature (43)..(44): n is a, c, g, or t
  misc_feature (53)..(54): n is a, c, g, or t
tttttttaagcagtggtatcaacgcagagtacnnagcctaacnncggtagttnntttttttttttttttttttttttttttttt

SEQ ID NO: 1553 - DNA, 84 bp, Artificial
  Barcode component
  misc_feature (33)..(34): n is a, c, g, or t
  misc_feature (43)..(44): n is a, c, g, or t
  misc_feature (53)..(54): n is a, c, g, or t
tttttttaagcagtggtatcaacgcagagtacnnagcctaacnntgacttcgnntttttttttttttttttttttttttttttt

SEQ ID NO: 1554 - DNA, 84 bp, Artificial
  Barcode component
  misc_feature (33)..(34): n is a, c, g, or t
  misc_feature (43)..(44): n is a, c, g, or t
  misc_feature (53)..(54): n is a, c, g, or t
tttttttaagcagtggtatcaacgcagagtacnnagcctaacnngagtgcaanntttttttttttttttttttttttttttttt

SEQ ID NO: 1555 - DNA, 84 bp, Artificial
  Barcode component
  misc_feature (33)..(34): n is a, c, g, or t
  misc_feature (43)..(44): n is a, c, g, or t
  misc_feature (53)..(54): n is a, c, g, or t
tttttttaagcagtggtatcaacgcagagtacnnagcctaacnnacggtaacnntttttttttttttttttttttttttttttt

SEQ ID NO: 1556 - DNA, 84 bp, Artificial
  Barcode component
  misc_feature (33)..(34): n is a, c, g, or t
  misc_feature (43)..(44): n is a, c, g, or t
  misc_feature (53)..(54): n is a, c, g, or t
tttttttaagcagtggtatcaacgcagagtacnnagcctaacnnaagtggtgnntttttttttttttttttttttttttttttt

SEQ ID NO: 1557 - DNA, 84 bp, Artificial
  Barcode component
  misc_feature (33)..(34): n is a, c, g, or t
  misc_feature (43)..(44): n is a, c, g, or t
  misc_feature (53)..(54): n is a, c, g, or t
tttttttaagcagtggtatcaacgcagagtacnnagcctaacnnggagacaanntttttttttttttttttttttttttttttt

SEQ ID NO: 1558 - DNA, 84 bp, Artificial
  Barcode component
  misc_feature (33)..(34): n is a, c, g, or t
  misc_feature (43)..(44): n is a, c, g, or t
  misc_feature (53)..(54): n is a, c, g, or t
tttttttaagcagtggtatcaacgcagagtacnnagcctaacnntcaaggacnntttttttttttttttttttttttttttttt

SEQ ID NO: 1559 - DNA, 84 bp, Artificial
  Barcode component
  misc_feature (33)..(34): n is a, c, g, or t
  misc_feature (43)..(44): n is a, c, g, or t
  misc_feature (53)..(54): n is a, c, g, or t
tttttttaagcagtggtatcaacgcagagtacnnagcctaacnnaagagagcnntttttttttttttttttttttttttttttt

SEQ ID NO: 1560 - DNA, 84 bp, Artificial
  Barcode component
  misc_feature (33)..(34): n is a, c, g, or t
  misc_feature (43)..(44): n is a, c, g, or t
  misc_feature (53)..(54): n is a, c, g, or t
tttttttaagcagtggtatcaacgcagagtacnnagcctaacnncgagagatnntttttttttttttttttttttttttttttt

SEQ ID NO: 1561 - DNA, 84 bp, Artificial
  Barcode component
  misc_feature (33)..(34): n is a, c, g, or t
  misc_feature (43)..(44): n is a, c, g, or t
  misc_feature (53)..(54): n is a, c, g, or t
tttttttaagcagtggtatcaacgcagagtacnnagcctaacnnacagatggnntttttttttttttttttttttttttttttt

SEQ ID NO: 1562 - DNA, 84 bp, Artificial
  Barcode component
  misc_feature (33)..(34): n is a, c, g, or t
  misc_feature (43)..(44): n is a, c, g, or t
  misc_feature (53)..(54): n is a, c, g, or t
tttttttaagcagtggtatcaacgcagagtacnnagcctaacnnaggagtcanntttttttttttttttttttttttttttttt

SEQ ID NO: 1563 - DNA, 84 bp, Artificial
  Barcode component
  misc_feature (33)..(34): n is a, c, g, or t
  misc_feature (43)..(44): n is a, c, g, or t
  misc_feature (53)..(54): n is a, c, g, or t
tttttttaagcagtggtatcaacgcagagtacnnagcctaacnncgtgttacnntttttttttttttttttttttttttttttt

SEQ ID NO: 1564 - DNA, 84 bp, Artificial
  Barcode component
  misc_feature (33)..(34): n is a, c, g, or t
  misc_feature (43)..(44): n is a, c, g, or t
  misc_feature (53)..(54): n is a, c, g, or t
tttttttaagcagtggtatcaacgcagagtacnnagcctaacnntagtgtgcnntttttttttttttttttttttttttttttt

SEQ ID NO: 1565 - DNA, 84 bp, Artificial
  Barcode component
  misc_feature (33)..(34): n is a, c, g, or t
  misc_feature (43)..(44): n is a, c, g, or t
  misc_feature (53)..(54): n is a, c, g, or t
tttttttaagcagtggtatcaacgcagagtacnnagcctaacnnctcatgacnntttttttttttttttttttttttttttttt

SEQ ID NO: 1566 - DNA, 84 bp, Artificial
  Barcode component
  misc_feature (33)..(34): n is a, c, g, or t
  misc_feature (43)..(44): n is a, c, g, or t
  misc_feature (53)..(54): n is a, c, g, or t
tttttttaagcagtggtatcaacgcagagtacnnagcctaacnngtatccagnntttttttttttttttttttttttttttttt

SEQ ID NO: 1567 - DNA, 84 bp, Artificial
  Barcode component
  misc_feature (33)..(34): n is a, c, g, or t
  misc_feature (43)..(44): n is a, c, g, or t
  misc_feature (53)..(54): n is a, c, g, or t
tttttttaagcagtggtatcaacgcagagtacnnagcctaacnnacgcctatnntttttttttttttttttttttttttttttt

SEQ ID NO: 1568 - DNA, 84 bp, Artificial
  Barcode component
  misc_feature (33)..(34): n is a, c, g, or t
  misc_feature (43)..(44): n is a, c, g, or t
  misc_feature (53)..(54): n is a, c, g, or t
tttttttaagcagtggtatcaacgcagagtacnnagcctaacnnaacgacctnntttttttttttttttttttttttttttttt

SEQ ID NO: 1569 - DNA, 84 bp, Artificial
  Barcode component
  misc_feature (33)..(34): n is a, c, g, or t
  misc_feature (43)..(44): n is a, c, g, or t
  misc_feature (53)..(54): n is a, c, g, or t
tttttttaagcagtggtatcaacgcagagtacnnagcctaacnnatcaggctnntttttttttttttttttttttttttttttt

SEQ ID NO: 1570 - DNA, 84 bp, Artificial
  Barcode component
  misc_feature (33)..(34): n is a, c, g, or t
  misc_feature (43)..(44): n is a, c, g, or t
  misc_feature (53)..(54): n is a, c, g, or t
tttttttaagcagtggtatcaacgcagagtacnnagcctaacnncaagttcgnntttttttttttttttttttttttttttttt

SEQ ID NO: 1571 - DNA, 84 bp, Artificial
  Barcode component
  misc_feature (33)..(34): n is a, c, g, or t
  misc_feature (43)..(44): n is a, c, g, or t
  misc_feature (53)..(54): n is a, c, g, or t
tttttttaagcagtggtatcaacgcagagtacnnagcctaacnntagccaganntttttttttttttttttttttttttttttt

SEQ ID NO: 1572 - DNA, 84 bp, Artificial
  Barcode component
  misc_feature (33)..(34): n is a, c, g, or t
  misc_feature (43)..(44): n is a, c, g, or t
  misc_feature (53)..(54): n is a, c, g, or t
tttttttaagcagtggtatcaacgcagagtacnnagcctaacnncaatcacgnntttttttttttttttttttttttttttttt

SEQ ID NO: 1573 - DNA, 84 bp, Artificial
  Barcode component
  misc_feature (33)..(34): n is a, c, g, or t
  misc_feature (43)..(44): n is a, c, g, or t
  misc_feature (53)..(54): n is a, c, g, or t
tttttttaagcagtggtatcaacgcagagtacnnagcctaacnngcaacaagnntttttttttttttttttttttttttttttt

SEQ ID NO: 1574 - DNA, 84 bp, Artificial
  Barcode component
  misc_feature (33)..(34): n is a, c, g, or t
  misc_feature (43)..(44): n is a, c, g, or t
  misc_feature (53)..(54): n is a, c, g, or t
tttttttaagcagtggtatcaacgcagagtacnnagcctaacnncacgacaanntttttttttttttttttttttttttttttt

SEQ ID NO: 1575 - DNA, 84 bp, Artificial
  Barcode component
  misc_feature (33)..(34): n is a, c, g, or t
  misc_feature (43)..(44): n is a, c, g, or t
  misc_feature (53)..(54): n is a, c, g, or t
tttttttaagcagtggtatcaacgcagagtacnnagcctaacnntacggaganntttttttttttttttttttttttttttttt

SEQ ID NO: 1576 - DNA, 84 bp, Artificial
  Barcode component
  misc_feature (33)..(34): n is a, c, g, or t
  misc_feature (43)..(44): n is a, c, g, or t
  misc_feature (53)..(54): n is a, c, g, or t
tttttttaagcagtggtatcaacgcagagtacnnagcctaacnncgacaaganntttttttttttttttttttttttttttttt

SEQ ID NO: 1577 - DNA, 84 bp, Artificial
  Barcode component
  misc_feature (33)..(34): n is a, c, g, or t
  misc_feature (43)..(44): n is a, c, g, or t
  misc_feature (53)..(54): n is a, c, g, or t
tttttttaagcagtggtatcaacgcagagtacnnagcctaacnncgaagtganntttttttttttttttttttttttttttttt

SEQ ID NO: 1578 - DNA, 84 bp, Artificial
  Barcode component
  misc_feature (33)..(34): n is a, c, g, or t
  misc_feature (43)..(44): n is a, c, g, or t
  misc_feature (53)..(54): n is a, c, g, or t
tttttttaagcagtggtatcaacgcagagtacnnagcctaacnnagctggtanntttttttttttttttttttttttttttttt

SEQ ID NO: 1579 - DNA, 84 bp, Artificial
  Barcode component
  misc_feature (33)..(34): n is a, c, g, or t
  misc_feature (43)..(44): n is a, c, g, or t
  misc_feature (53)..(54): n is a, c, g, or t
tttttttaagcagtggtatcaacgcagagtacnnagcctaacnnaactaggcnntttttttttttttttttttttttttttttt

SEQ ID NO: 1580 - DNA, 84 bp, Artificial
  Barcode component
  misc_feature (33)..(34): n is a, c, g, or t
  misc_feature (43)..(44): n is a, c, g, or t
  misc_feature (53)..(54): n is a, c, g, or t
tttttttaagcagtggtatcaacgcagagtacnnagcctaacnncagcaagtnntttttttttttttttttttttttttttttt

SEQ ID NO: 1581 - DNA, 84 bp, Artificial
  Barcode component
  misc_feature (33)..(34): n is a, c, g, or t
  misc_feature (43)..(44): n is a, c, g, or t
  misc_feature (53)..(54): n is a, c, g, or t
tttttttaagcagtggtatcaacgcagagtacnnagcctaacnnacgaggtanntttttttttttttttttttttttttttttt

SEQ ID NO: 1582 - DNA, 84 bp, Artificial
  Barcode component
  misc_feature (33)..(34): n is a, c, g, or t
  misc_feature (43)..(44): n is a, c, g, or t
  misc_feature (53)..(54): n is a, c, g, or t
tttttttaagcagtggtatcaacgcagagtacnnagcctaacnncatcttccnntttttttttttttttttttttttttttttt

SEQ ID NO: 1583 - DNA, 84 bp, Artificial
  Barcode component
  misc_feature (33)..(34): n is a, c, g, or t
  misc_feature (43)..(44): n is a, c, g, or t
  misc_feature (53)..(54): n is a, c, g, or t
tttttttaagcagtggtatcaacgcagagtacnnagcctaacnncctgaatcnntttttttttttttttttttttttttttttt

SEQ ID NO: 1584 - DNA, 84 bp, Artificial
  Barcode component
  misc_feature (33)..(34): n is a, c, g, or t
  misc_feature (43)..(44): n is a, c, g, or t
  misc_feature (53)..(54): n is a, c, g, or t
tttttttaagcagtggtatcaacgcagagtacnnagcctaacnntgcagactnntttttttttttttttttttttttttttttt

SEQ ID NO: 1585 - DNA, 84 bp, Artificial
  Barcode component
  misc_feature (33)..(34): n is a, c, g, or t
  misc_feature (43)..(44): n is a, c, g, or t
  misc_feature (53)..(54): n is a, c, g, or t
tttttttaagcagtggtatcaacgcagagtacnnagcctaacnnagatgtggnntttttttttttttttttttttttttttttt

SEQ ID NO: 1586 - DNA, 84 bp, Artificial
  Barcode component
  misc_feature (33)..(34): n is a, c, g, or t
  misc_feature (43)..(44): n is a, c, g, or t
  misc_feature (53)..(54): n is a, c, g, or t
tttttttaagcagtggtatcaacgcagagtacnnagcctaacnnagttcgacnntttttttttttttttttttttttttttttt

SEQ ID NO: 1587 - DNA, 84 bp, Artificial
  Barcode component
  misc_feature (33)..(34): n is a, c, g, or t
  misc_feature (43)..(44): n is a, c, g, or t
  misc_feature (53)..(54): n is a, c, g, or t
tttttttaagcagtggtatcaacgcagagtacnnagcctaacnnacaacctcnntttttttttttttttttttttttttttttt

SEQ ID NO: 1588 - DNA, 84 bp, Artificial
  Barcode component
  misc_feature (33)..(34): n is a, c, g, or t
  misc_feature (43)..(44): n is a, c, g, or t
  misc_feature (53)..(54): n is a, c, g, or t
tttttttaagcagtggtatcaacgcagagtacnnagcctaacnncatggtagnntttttttttttttttttttttttttttttt

SEQ ID NO: 1589 - DNA, 84 bp, Artificial
  Barcode component
  misc_feature (33)..(34): n is a, c, g, or t
  misc_feature (43)..(44): n is a, c, g, or t
  misc_feature (53)..(54): n is a, c, g, or t
tttttttaagcagtggtatcaacgcagagtacnnagcctaacnncgtatctcnntttttttttttttttttttttttttttttt

SEQ ID NO: 1590 - DNA, 84 bp, Artificial
  Barcode component
  misc_feature (33)..(34): n is a, c, g, or t
  misc_feature (43)..(44): n is a, c, g, or t
  misc_feature (53)..(54): n is a, c, g, or t
tttttttaagcagtggtatcaacgcagagtacnnagcctaacnncctagttcnntttttttttttttttttttttttttttttt

SEQ ID NO: 1591 - DNA, 84 bp, Artificial
  Barcode component
  misc_feature (33)..(34): n is a, c, g, or t
  misc_feature (43)..(44): n is a, c, g, or t
  misc_feature (53)..(54): n is a, c, g, or t
tttttttaagcagtggtatcaacgcagagtacnnagcctaacnncaagagtcnntttttttttttttttttttttttttttttt

SEQ ID NO: 1592 - DNA, 84 bp, Artificial
  Barcode component
  misc_feature (33)..(34): n is a, c, g, or t
  misc_feature (43)..(44): n is a, c, g, or t
  misc_feature (53)..(54): n is a, c, g, or t
tttttttaagcagtggtatcaacgcagagtacnngcctatctnnaatcggcanntttttttttttttttttttttttttttttt

SEQ ID NO: 1593 - DNA, 84 bp, Artificial
  Barcode component
  misc_feature (33)..(34): n is a, c, g, or t
  misc_feature (43)..(44): n is a, c, g, or t
  misc_feature (53)..(54): n is a, c, g, or t
tttttttaagcagtggtatcaacgcagagtacnngcctatctnntacggcatnntttttttttttttttttttttttttttttt

SEQ ID NO: 1594 - DNA, 84 bp, Artificial
  Barcode component
  misc_feature (33)..(34): n is a, c, g, or t
  misc_feature (43)..(44): n is a, c, g, or t
  misc_feature (53)..(54): n is a, c, g, or t
tttttttaagcagtggtatcaacgcagagtacnngcctatctnnttggatcgnntttttttttttttttttttttttttttttt

SEQ ID NO: 1595 - DNA, 84 bp, Artificial
  Barcode component
  misc_feature (33)..(34): n is a, c, g, or t
  misc_feature (43)..(44): n is a, c, g, or t
  misc_feature (53)..(54): n is a, c, g, or t
tttttttaagcagtggtatcaacgcagagtacnngcctatctnntggaacganntttttttttttttttttttttttttttttt

SEQ ID NO: 1596 - DNA, 84 bp, Artificial
  Barcode component
  misc_feature (33)..(34): n is a, c, g, or t
  misc_feature (43)..(44): n is a, c, g, or t
  misc_feature (53)..(54): n is a, c, g, or t
tttttttaagcagtggtatcaacgcagagtacnngcctatctnnggcaatcanntttttttttttttttttttttttttttttt

SEQ ID NO: 1597 - DNA, 84 bp, Artificial
  Barcode component
  misc_feature (33)..(34): n is a, c, g, or t
  misc_feature (43)..(44): n is a, c, g, or t
  misc_feature (53)..(54): n is a, c, g, or t
tttttttaagcagtggtatcaacgcagagtacnngcctatctnngaatccganntttttttttttttttttttttttttttttt

SEQ ID NO: 1598 - DNA, 84 bp, Artificial
  Barcode component
  misc_feature (33)..(34): n is a, c, g, or t
  misc_feature (43)..(44): n is a, c, g, or t
  misc_feature (53)..(54): n is a, c, g, or t
tttttttaagcagtggtatcaacgcagagtacnngcctatctnnttacggtgnntttttttttttttttttttttttttttttt

SEQ ID NO: 1599 - DNA, 84 bp, Artificial
  Barcode component
  misc_feature (33)..(34): n is a, c, g, or t
  misc_feature (43)..(44): n is a, c, g, or t
  misc_feature (53)..(54): n is a, c, g, or t
tttttttaagcagtggtatcaacgcagagtacnngcctatctnncatatcggnntttttttttttttttttttttttttttttt

SEQ ID NO: 1600 - DNA, 84 bp, Artificial
  Barcode component
  misc_feature (33)..(34): n is a, c, g, or t
  misc_feature (43)..(44): n is a, c, g, or t
  misc_feature (53)..(54): n is a, c, g, or t
tttttttaagcagtggtatcaacgcagagtacnngcctatctnncttcggtanntttttttttttttttttttttttttttttt

SEQ ID NO: 1601 - DNA, 84 bp, Artificial
  Barcode component
  misc_feature (33)..(34): n is a, c, g, or t
  misc_feature (43)..(44): n is a, c, g, or t
  misc_feature (53)..(54): n is a, c, g, or t
tttttttaagcagtggtatcaacgcagagtacnngcctatctnntcctaacgnntttttttttttttttttttttttttttttt

SEQ ID NO: 1602 - DNA, 84 bp, Artificial
  Barcode component
  misc_feature (33)..(34): n is a, c, g, or t
  misc_feature (43)..(44): n is a, c, g, or t
  misc_feature (53)..(54): n is a, c, g, or t
tttttttaagcagtggtatcaacgcagagtacnngcctatctnngtaagccanntttttttttttttttttttttttttttttt

SEQ ID NO: 1603 - DNA, 84 bp, Artificial
  Barcode component
  misc_feature (33)..(34): n is a, c, g, or t
  misc_feature (43)..(44): n is a, c, g, or t
  misc_feature (53)..(54): n is a, c, g, or t
tttttttaagcagtggtatcaacgcagagtacnngcctatctnntaaggtggnntttttttttttttttttttttttttttttt

SEQ ID NO: 1604 - DNA, 84 bp, Artificial
  Barcode component
  misc_feature (33)..(34): n is a, c, g, or t
  misc_feature (43)..(44): n is a, c, g, or t
  misc_feature (53)..(54): n is a, c, g, or t
tttttttaagcagtggtatcaacgcagagtacnngcctatctnnggtaagctnntttttttttttttttttttttttttttttt

SEQ ID NO: 1605 - DNA, 84 bp, Artificial
  Barcode component
  misc_feature (33)..(34): n is a, c, g, or t
  misc_feature (43)..(44): n is a, c, g, or t
  misc_feature (53)..(54): n is a, c, g, or t
tttttttaagcagtggtatcaacgcagagtacnngcctatctnntgtgtcganntttttttttttttttttttttttttttttt

SEQ ID NO: 1606 - DNA, 84 bp, Artificial
  Barcode component
  misc_feature (33)..(34): n is a, c, g, or t
  misc_feature (43)..(44): n is a, c, g, or t
  misc_feature (53)..(54): n is a, c, g, or t
tttttttaagcagtggtatcaacgcagagtacnngcctatctnngagcatganntttttttttttttttttttttttttttttt

SEQ ID NO: 1607 - DNA, 84 bp, Artificial
  Barcode component
  misc_feature (33)..(34): n is a, c, g, or t
  misc_feature (43)..(44): n is a, c, g, or t
  misc_feature (53)..(54): n is a, c, g, or t
tttttttaagcagtggtatcaacgcagagtacnngcctatctnntcgaagtcnntttttttttttttttttttttttttttttt

SEQ ID NO: 1608 - DNA, 84 bp, Artificial
  Barcode component
  misc_feature (33)..(34): n is a, c, g, or t
  misc_feature (43)..(44): n is a, c, g, or t
  misc_feature (53)..(54): n is a, c, g, or t
tttttttaagcagtggtatcaacgcagagtacnngcctatctnnggtgaacanntttttttttttttttttttttttttttttt

SEQ ID NO: 1609 - DNA, 84 bp, Artificial
  Barcode component
  misc_feature (33)..(34): n is a, c, g, or t
  misc_feature (43)..(44): n is a, c, g, or t
  misc_feature (53)..(54): n is a, c, g, or t
tttttttaagcagtggtatcaacgcagagtacnngcctatctnnacatgcacnntttttttttttttttttttttttttttttt

SEQ ID NO: 1610 - DNA, 84 bp, Artificial
  Barcode component
  misc_feature (33)..(34): n is a, c, g, or t
  misc_feature (43)..(44): n is a, c, g, or t
  misc_feature (53)..(54): n is a, c, g, or t
tttttttaagcagtggtatcaacgcagagtacnngcctatctnnccaacagtnntttttttttttttttttttttttttttttt

SEQ ID NO: 1611 - DNA, 84 bp, Artificial
  Barcode component
  misc_feature (33)..(34): n is a, c, g, or t
  misc_feature (43)..(44): n is a, c, g, or t
  misc_feature (53)..(54): n is a, c, g, or t
tttttttaagcagtggtatcaacgcagagtacnngcctatctnnagaacagcnntttttttttttttttttttttttttttttt

SEQ ID NO: 1612 - DNA, 84 bp, Artificial
  Barcode component
  misc_feature (33)..(34): n is a, c, g, or t
  misc_feature (43)..(44): n is a, c, g, or t
  misc_feature (53)..(54): n is a, c, g, or t
tttttttaagcagtggtatcaacgcagagtacnngcctatctnngaacacgtnntttttttttttttttttttttttttttttt

SEQ ID NO: 1613 - DNA, 84 bp, Artificial
  Barcode component
  misc_feature (33)..(34): n is a, c, g, or t
  misc_feature (43)..(44): n is a, c, g, or t
  misc_feature (53)..(54): n is a, c, g, or t
tttttttaagcagtggtatcaacgcagagtacnngcctatctnnggtcttcanntttttttttttttttttttttttttttttt

SEQ ID NO: 1614 - DNA, 84 bp, Artificial
  Barcode component
  misc_feature (33)..(34): n is a, c, g, or t
  misc_feature (43)..(44): n is a, c, g, or t
  misc_feature (53)..(54): n is a, c, g, or t
tttttttaagcagtggtatcaacgcagagtacnngcctatctnnaggttcagnntttttttttttttttttttttttttttttt

SEQ ID NO: 1615 - DNA, 84 bp, Artificial
  Barcode component
  misc_feature (33)..(34): n is a, c, g, or t
  misc_feature (43)..(44): n is a, c, g, or t
  misc_feature (53)..(54): n is a, c, g, or t
tttttttaagcagtggtatcaacgcagagtacnngcctatctnnctagagcanntttttttttttttttttttttttttttttt

SEQ ID NO: 1616 - DNA, 84 bp, Artificial
  Barcode component
  misc_feature (33)..(34): n is a, c, g, or t
  misc_feature (43)..(44): n is a, c, g, or t
  misc_feature (53)..(54): n is a, c, g, or t
tttttttaagcagtggtatcaacgcagagtacnngcctatctnncttctagcnntttttttttttttttttttttttttttttt

SEQ ID NO: 1617 - DNA, 84 bp, Artificial
  Barcode component
  misc_feature (33)..(34): n is a, c, g, or t
  misc_feature (43)..(44): n is a, c, g, or t
  misc_feature (53)..(54): n is a, c, g, or t
tttttttaagcagtggtatcaacgcagagtacnngcctatctnngagtaacgnntttttttttttttttttttttttttttttt

SEQ ID NO: 1618 - DNA, 84 bp, Artificial
  Barcode component
  misc_feature (33)..(34): n is a, c, g, or t
  misc_feature (43)..(44): n is a, c, g, or t
  misc_feature (53)..(54): n is a, c, g, or t
tttttttaagcagtggtatcaacgcagagtacnngcctatctnnctaagaggnntttttttttttttttttttttttttttttt

SEQ ID NO: 1619 - DNA, 84 bp, Artificial
  Barcode component
  misc_feature (33)..(34): n is a, c, g, or t
  misc_feature (43)..(44): n is a, c, g, or t
  misc_feature (53)..(54): n is a, c, g, or t
tttttttaagcagtggtatcaacgcagagtacnngcctatctnnacgtgtagnntttttttttttttttttttttttttttttt

SEQ ID NO: 1620 - DNA, 84 bp, Artificial
  Barcode component
  misc_feature (33)..(34): n is a, c, g, or t
  misc_feature (43)..(44): n is a, c, g, or t
  misc_feature (53)..(54): n is a, c, g, or t
tttttttaagcagtggtatcaacgcagagtacnngcctatctnnactacaggnntttttttttttttttttttttttttttttt

SEQ ID NO: 1621 - DNA, 84 bp, Artificial
  Barcode component
  misc_feature (33)..(34): n is a, c, g, or t
  misc_feature (43)..(44): n is a, c, g, or t
  misc_feature (53)..(54): n is a, c, g, or t
tttttttaagcagtggtatcaacgcagagtacnngcctatctnntacaggtcnntttttttttttttttttttttttttttttt

SEQ ID NO: 1622 - DNA, 84 bp, Artificial
  Barcode component
  misc_feature (33)..(34): n is a, c, g, or t
  misc_feature (43)..(44): n is a, c, g, or t
  misc_feature (53)..(54): n is a, c, g, or t
tttttttaagcagtggtatcaacgcagagtacnngcctatctnnctcacatgnntttttttttttttttttttttttttttttt

SEQ ID NO: 1623 - DNA, 84 bp, Artificial
  Barcode component
  misc_feature (33)..(34): n is a, c, g, or t
  misc_feature (43)..(44): n is a, c, g, or t
  misc_feature (53)..(54): n is a, c, g, or t
tttttttaagcagtggtatcaacgcagagtacnngcctatctnnactaggagnntttttttttttttttttttttttttttttt

SEQ ID NO: 1624 - DNA, 84 bp, Artificial
  Barcode component
  misc_feature (33)..(34): n is a, c, g, or t
  misc_feature (43)..(44): n is a, c, g, or t
  misc_feature (53)..(54): n is a, c, g, or t
tttttttaagcagtggtatcaacgcagagtacnngcctatctnnccatagganntttttttttttttttttttttttttttttt

SEQ ID NO: 1625 - DNA, 84 bp, Artificial
  Barcode component
  misc_feature (33)..(34): n is a, c, g, or t
  misc_feature (43)..(44): n is a, c, g, or t
  misc_feature (53)..(54): n is a, c, g, or t
tttttttaagcagtggtatcaacgcagagtacnngcctatctnnggagaatcnntttttttttttttttttttttttttttttt

SEQ ID NO: 1626 - DNA, 84 bp, Artificial
  Barcode component
  misc_feature (33)..(34): n is a, c, g, or t
  misc_feature (43)..(44): n is a, c, g, or t
  misc_feature (53)..(54): n is a, c, g, or t
tttttttaagcagtggtatcaacgcagagtacnngcctatctnngccaagaanntttttttttttttttttttttttttttttt

SEQ ID NO: 1627 - DNA, 84 bp, Artificial
  Barcode component
  misc_feature (33)..(34): n is a, c, g, or t
  misc_feature (43)..(44): n is a, c, g, or t
  misc_feature (53)..(54): n is a, c, g, or t
tttttttaagcagtggtatcaacgcagagtacnngcctatctnnaaggcaagnntttttttttttttttttttttttttttttt

SEQ ID NO: 1628 - DNA, 84 bp, Artificial
  Barcode component
  misc_feature (33)..(34): n is a, c, g, or t
  misc_feature (43)..(44): n is a, c, g, or t
  misc_feature (53)..(54): n is a, c, g, or t
tttttttaagcagtggtatcaacgcagagtacnngcctatctnnaatgtcgcnntttttttttttttttttttttttttttttt

SEQ ID NO: 1629 - DNA, 84 bp, Artificial
  Barcode component
  misc_feature (33)..(34): n is a, c, g, or t
  misc_feature (43)..(44): n is a, c, g, or t
  misc_feature (53)..(54): n is a, c, g, or t
tttttttaagcagtggtatcaacgcagagtacnngcctatctnnatggaaccnntttttttttttttttttttttttttttttt

SEQ ID NO: 1630 - DNA, 84 bp, Artificial
  Barcode component
  misc_feature (33)..(34): n is a, c, g, or t
  misc_feature (43)..(44): n is a, c, g, or t
  misc_feature (53)..(54): n is a, c, g, or t
tttttttaagcagtggtatcaacgcagagtacnngcctatctnnagaggcatnntttttttttttttttttttttttttttttt

SEQ ID NO: 1631 - DNA, 84 bp, Artificial
  Barcode component
  misc_feature (33)..(34): n is a, c, g, or t
  misc_feature (43)..(44): n is a, c, g, or t
  misc_feature (53)..(54): n is a, c, g, or t
tttttttaagcagtggtatcaacgcagagtacnngcctatctnntgcatagcnntttttttttttttttttttttttttttttt

SEQ ID NO: 1632 - DNA, 84 bp, Artificial
  Barcode component
  misc_feature (33)..(34): n is a, c, g, or t
  misc_feature (43)..(44): n is a, c, g, or t
  misc_feature (53)..(54): n is a, c, g, or t
tttttttaagcagtggtatcaacgcagagtacnngcctatctnnctaacgganntttttttttttttttttttttttttttttt

SEQ ID NO: 1633 - DNA, 84 bp, Artificial
  Barcode component
  misc_feature (33)..(34): n is a, c, g, or t
  misc_feature (43)..(44): n is a, c, g, or t
  misc_feature (53)..(54): n is a, c, g, or t
tttttttaagcagtggtatcaacgcagagtacnngcctatctnntatcgaggnntttttttttttttttttttttttttttttt

SEQ ID NO: 1634 - DNA, 84 bp, Artificial
  Barcode component
  misc_feature (33)..(34): n is a, c, g, or t
  misc_feature (43)..(44): n is a, c, g, or t
  misc_feature (53)..(54): n is a, c, g, or t
tttttttaagcagtggtatcaacgcagagtacnngcctatctnncatagcctnntttttttttttttttttttttttttttttt

SEQ ID NO: 1635 - DNA, 84 bp, Artificial
  Barcode component
  misc_feature (33)..(34): n is a, c, g, or t
  misc_feature (43)..(44): n is a, c, g, or t
  misc_feature (53)..(54): n is a, c, g, or t
tttttttaagcagtggtatcaacgcagagtacnngcctatctnnatcgagacnntttttttttttttttttttttttttttttt

SEQ ID NO: 1636 - DNA, 84 bp, Artificial
  Barcode component
  misc_feature (33)..(34): n is a, c, g, or t
  misc_feature (43)..(44): n is a, c, g, or t
  misc_feature (53)..(54): n is a, c, g, or t
tttttttaagcagtggtatcaacgcagagtacnngcctatctnnggaagagtnntttttttttttttttttttttttttttttt

SEQ ID NO: 1637 - DNA, 84 bp, Artificial
  Barcode component
  misc_feature (33)..(34): n is a, c, g, or t
  misc_feature (43)..(44): n is a, c, g, or t
  misc_feature (53)..(54): n is a, c, g, or t
tttttttaagcagtggtatcaacgcagagtacnngcctatctnnccaagtagnntttttttttttttttttttttttttttttt

SEQ ID NO: 1638 - DNA, 84 bp, Artificial
  Barcode component
  misc_feature (33)..(34): n is a, c, g, or t
  misc_feature (43)..(44): n is a, c, g, or t
  misc_feature (53)..(54): n is a, c, g, or t
tttttttaagcagtggtatcaacgcagagtacnngcctatctnnctgaacagnntttttttttttttttttttttttttttttt

SEQ ID NO: 1639 - DNA, 84 bp, Artificial
  Barcode component
  misc_feature (33)..(34): n is a, c, g, or t
  misc_feature (43)..(44): n is a, c, g, or t
  misc_feature (53)..(54): n is a, c, g, or t
tttttttaagcagtggtatcaacgcagagtacnngcctatctnngtaggttcnntttttttttttttttttttttttttttttt

SEQ ID NO: 1640 - DNA, 84 bp, Artificial
  Barcode component
  misc_feature (33)..(34): n is a, c, g, or t
  misc_feature (43)..(44): n is a, c, g, or t
  misc_feature (53)..(54): n is a, c, g, or t
tttttttaagcagtggtatcaacgcagagtacnngcctatctnngtatggacnntttttttttttttttttttttttttttttt

SEQ ID NO: 1641 - DNA, 84 bp, Artificial
  Barcode component
  misc_feature (33)..(34): n is a, c, g, or t
  misc_feature (43)..(44): n is a, c, g, or t
  misc_feature (53)..(54): n is a, c, g, or t
tttttttaagcagtggtatcaacgcagagtacnngcctatctnntcgcaacanntttttttttttttttttttttttttttttt

SEQ ID NO: 1642 - DNA, 84 bp, Artificial
  Barcode component
  misc_feature (33)..(34): n is a, c, g, or t
  misc_feature (43)..(44): n is a, c, g, or t
  misc_feature (53)..(54): n is a, c, g, or t
tttttttaagcagtggtatcaacgcagagtacnngcctatctnnccgctaatnntttttttttttttttttttttttttttttt

SEQ ID NO: 1643 - DNA, 84 bp, Artificial
  Barcode component
  misc_feature (33)..(34): n is a, c, g, or t
  misc_feature (43)..(44): n is a, c, g, or t
  misc_feature (53)..(54): n is a, c, g, or t
tttttttaagcagtggtatcaacgcagagtacnngcctatctnngattcgcanntttttttttttttttttttttttttttttt

SEQ ID NO: 1644 - DNA, 84 bp, Artificial
  Barcode component
  misc_feature (33)..(34): n is a, c, g, or t
  misc_feature (43)..(44): n is a, c, g, or t
  misc_feature (53)..(54): n is a, c, g, or t
tttttttaagcagtggtatcaacgcagagtacnngcctatctnncgatggaanntttttttttttttttttttttttttttttt

SEQ ID NO: 1645 - DNA, 84 bp, Artificial
  Barcode component
  misc_feature (33)..(34): n is a, c, g, or t
  misc_feature (43)..(44): n is a, c, g, or t
  misc_feature (53)..(54): n is a, c, g, or t
tttttttaagcagtggtatcaacgcagagtacnngcctatctnnagcaagganntttttttttttttttttttttttttttttt

SEQ ID NO: 1646 - DNA, 84 bp, Artificial
  Barcode component
  misc_feature (33)..(34): n is a, c, g, or t
  misc_feature (43)..(44): n is a, c, g, or t
  misc_feature (53)..(54): n is a, c, g, or t
tttttttaagcagtggtatcaacgcagagtacnngcctatctnncgtagcaanntttttttttttttttttttttttttttttt

SEQ ID NO: 1647 - DNA, 84 bp, Artificial
  Barcode component
  misc_feature (33)..(34): n is a, c, g, or t
  misc_feature (43)..(44): n is a, c, g, or t
  misc_feature (53)..(54): n is a, c, g, or t
tttttttaagcagtggtatcaacgcagagtacnngcctatctnntggcagtanntttttttttttttttttttttttttttttt

SEQ ID NO: 1648 - DNA, 84 bp, Artificial
  Barcode component
  misc_feature (33)..(34): n is a, c, g, or t
  misc_feature (43)..(44): n is a, c, g, or t
  misc_feature (53)..(54): n is a, c, g, or t
tttttttaagcagtggtatcaacgcagagtacnngcctatctnncggtagttnntttttttttttttttttttttttttttttt

SEQ ID NO: 1649 - DNA, 84 bp, Artificial
  Barcode component
  misc_feature (33)..(34): n is a, c, g, or t
  misc_feature (43)..(44): n is a, c, g, or t
  misc_feature (53)..(54): n is a, c, g, or t
tttttttaagcagtggtatcaacgcagagtacnngcctatctnntgacttcgnntttttttttttttttttttttttttttttt

SEQ ID NO: 1650 - DNA, 84 bp, Artificial
  Barcode component
  misc_feature (33)..(34): n is a, c, g, or t
  misc_feature (43)..(44): n is a, c, g, or t
  misc_feature (53)..(54): n is a, c, g, or t
tttttttaagcagtggtatcaacgcagagtacnngcctatctnngagtgcaanntttttttttttttttttttttttttttttt

SEQ ID NO: 1651 - DNA, 84 bp, Artificial
  Barcode component
  misc_feature (33)..(34): n is a, c, g, or t
  misc_feature (43)..(44): n is a, c, g, or t
  misc_feature (53)..(54): n is a, c, g, or t
tttttttaagcagtggtatcaacgcagagtacnngcctatctnnacggtaacnntttttttttttttttttttttttttttttt

SEQ ID NO: 1652 - DNA, 84 bp, Artificial
  Barcode component
  misc_feature (33)..(34): n is a, c, g, or t
  misc_feature (43)..(44): n is a, c, g, or t
  misc_feature (53)..(54): n is a, c, g, or t
tttttttaagcagtggtatcaacgcagagtacnngcctatctnnaagtggtgnntttttttttttttttttttttttttttttt

SEQ ID NO: 1653 - DNA, 84 bp, Artificial
  Barcode component
  misc_feature (33)..(34): n is a, c, g, or t
  misc_feature (43)..(44): n is a, c, g, or t
  misc_feature (53)..(54): n is a, c, g, or t
tttttttaagcagtggtatcaacgcagagtacnngcctatctnnggagacaanntttttttttttttttttttttttttttttt

SEQ ID NO: 1654 - DNA, 84 bp, Artificial
  Barcode component
  misc_feature (33)..(34): n is a, c, g, or t
  misc_feature (43)..(44): n is a, c, g, or t
  misc_feature (53)..(54): n is a, c, g, or t
tttttttaagcagtggtatcaacgcagagtacnngcctatctnntcaaggacnntttttttttttttttttttttttttttttt

SEQ ID NO: 1655 - DNA, 84 bp, Artificial
  Barcode component
  misc_feature (33)..(34): n is a, c, g, or t
  misc_feature (43)..(44): n is a, c, g, or t
  misc_feature (53)..(54): n is a, c, g, or t
tttttttaagcagtggtatcaacgcagagtacnngcctatctnnaagagagcnntttttttttttttttttttttttttttttt

SEQ ID NO: 1656 - DNA, 84 bp, Artificial
  Barcode component
  misc_feature (33)..(34): n is a, c, g, or t
  misc_feature (43)..(44): n is a, c, g, or t
  misc_feature (53)..(54): n is a, c, g, or t
tttttttaagcagtggtatcaacgcagagtacnngcctatctnncgagagatnntttttttttttttttttttttttttttttt

SEQ ID NO: 1657 - DNA, 84 bp, Artificial
  Barcode component
  misc_feature (33)..(34): n is a, c, g, or t
  misc_feature (43)..(44): n is a, c, g, or t
  misc_feature (53)..(54): n is a, c, g, or t
tttttttaagcagtggtatcaacgcagagtacnngcctatctnnacagatggnntttttttttttttttttttttttttttttt

SEQ ID NO: 1658 - DNA, 84 bp, Artificial
  Barcode component
  misc_feature (33)..(34): n is a, c, g, or t
  misc_feature (43)..(44): n is a, c, g, or t
  misc_feature (53)..(54): n is a, c, g, or t
tttttttaagcagtggtatcaacgcagagtacnngcctatctnnaggagtcanntttttttttttttttttttttttttttttt

SEQ ID NO: 1659 - DNA, 84 bp, Artificial
  Barcode component
  misc_feature (33)..(34): n is a, c, g, or t
  misc_feature (43)..(44): n is a, c, g, or t
  misc_feature (53)..(54): n is a, c, g, or t
tttttttaagcagtggtatcaacgcagagtacnngcctatctnncgtgttacnntttttttttttttttttttttttttttttt

SEQ ID NO: 1660 - DNA, 84 bp, Artificial
  Barcode component
  misc_feature (33)..(34): n is a, c, g, or t
  misc_feature (43)..(44): n is a, c, g, or t
  misc_feature (53)..(54): n is a, c, g, or t
tttttttaagcagtggtatcaacgcagagtacnngcctatctnntagtgtgcnntttttttttttttttttttttttttttttt

SEQ ID NO: 1661 - DNA, 84 bp, Artificial
  Barcode component
  misc_feature (33)..(34): n is a, c, g, or t
  misc_feature (43)..(44): n is a, c, g, or t
  misc_feature (53)..(54): n is a, c, g, or t
tttttttaagcagtggtatcaacgcagagtacnngcctatctnnctcatgacnntttttttttttttttttttttttttttttt

SEQ ID NO: 1662 - DNA, 84 bp, Artificial
  Barcode component
  misc_feature (33)..(34): n is a, c, g, or t
  misc_feature (43)..(44): n is a, c, g, or t
  misc_feature (53)..(54): n is a, c, g, or t
tttttttaagcagtggtatcaacgcagagtacnngcctatctnngtatccagnntttttttttttttttttttttttttttttt

SEQ ID NO: 1663 - DNA, 84 bp, Artificial
  Barcode component
  misc_feature (33)..(34): n is a, c, g, or t
  misc_feature (43)..(44): n is a, c, g, or t
  misc_feature (53)..(54): n is a, c, g, or t
tttttttaagcagtggtatcaacgcagagtacnngcctatctnnacgcctatnntttttttttttttttttttttttttttttt

SEQ ID NO: 1664 - DNA, 84 bp, Artificial
  Barcode component
  misc_feature (33)..(34): n is a, c, g, or t
  misc_feature (43)..(44): n is a, c, g, or t
  misc_feature (53)..(54): n is a, c, g, or t
tttttttaagcagtggtatcaacgcagagtacnngcctatctnnaacgacctnntttttttttttttttttttttttttttttt

SEQ ID NO: 1665 - DNA, 84 bp, Artificial
  Barcode component
  misc_feature (33)..(34): n is a, c, g, or t
  misc_feature (43)..(44): n is a, c, g, or t
  misc_feature (53)..(54): n is a, c, g, or t
tttttttaagcagtggtatcaacgcagagtacnngcctatctnnatcaggctnntttttttttttttttttttttttttttttt

SEQ ID NO: 1666 - DNA, 84 bp, Artificial
  Barcode component
  misc_feature (33)..(34): n is a, c, g, or t
  misc_feature (43)..(44): n is a, c, g, or t
  misc_feature (53)..(54): n is a, c, g, or t
tttttttaagcagtggtatcaacgcagagtacnngcctatctnncaagttcgnntttttttttttttttttttttttttttttt

SEQ ID NO: 1667 - DNA, 84 bp, Artificial
  Barcode component
  misc_feature (33)..(34): n is a, c, g, or t
  misc_feature (43)..(44): n is a, c, g, or t
  misc_feature (53)..(54): n is a, c, g, or t
tttttttaagcagtggtatcaacgcagagtacnngcctatctnntagccaganntttttttttttttttttttttttttttttt

SEQ ID NO: 1668 - DNA, 84 bp, Artificial
  Barcode component
  misc_feature (33)..(34): n is a, c, g, or t
  misc_feature (43)..(44): n is a, c, g, or t
  misc_feature (53)..(54): n is a, c, g, or t
tttttttaagcagtggtatcaacgcagagtacnngcctatctnncaatcacgnntttttttttttttttttttttttttttttt

SEQ ID NO: 1669 - DNA, 84 bp, Artificial
  Barcode component
  misc_feature (33)..(34): n is a, c, g, or t
  misc_feature (43)..(44): n is a, c, g, or t
  misc_feature (53)..(54): n is a, c, g, or t
tttttttaagcagtggtatcaacgcagagtacnngcctatctnngcaacaagnntttttttttttttttttttttttttttttt

SEQ ID NO: 1670 - DNA, 84 bp, Artificial
  Barcode component
  misc_feature (33)..(34): n is a, c, g, or t
  misc_feature (43)..(44): n is a, c, g, or t
  misc_feature (53)..(54): n is a, c, g, or t
tttttttaagcagtggtatcaacgcagagtacnngcctatctnncacgacaanntttttttttttttttttttttttttttttt

SEQ ID NO: 1671 - DNA, 84 bp, Artificial
  Barcode component
  misc_feature (33)..(34): n is a, c, g, or t
  misc_feature (43)..(44): n is a, c, g, or t
  misc_feature (53)..(54): n is a, c, g, or t
tttttttaagcagtggtatcaacgcagagtacnngcctatctnntacggaganntttttttttttttttttttttttttttttt

SEQ ID NO: 1672 - DNA, 84 bp, Artificial
  Barcode component
  misc_feature (33)..(34): n is a, c, g, or t
  misc_feature (43)..(44): n is a, c, g, or t
  misc_feature (53)..(54): n is a, c, g, or t
tttttttaagcagtggtatcaacgcagagtacnngcctatctnncgacaaganntttttttttttttttttttttttttttttt

SEQ ID NO: 1673 - DNA, 84 bp, Artificial
  Barcode component
  misc_feature (33)..(34): n is a, c, g, or t
  misc_feature (43)..(44): n is a, c, g, or t
  misc_feature (53)..(54): n is a, c, g, or t
tttttttaagcagtggtatcaacgcagagtacnngcctatctnncgaagtganntttttttttttttttttttttttttttttt

SEQ ID NO: 1674 - DNA, 84 bp, Artificial
  Barcode component
  misc_feature (33)..(34): n is a, c, g, or t
  misc_feature (43)..(44): n is a, c, g, or t
  misc_feature (53)..(54): n is a, c, g, or t
tttttttaagcagtggtatcaacgcagagtacnngcctatctnnagctggtanntttttttttttttttttttttttttttttt

SEQ ID NO: 1675 - DNA, 84 bp, Artificial
  Barcode component
  misc_feature (33)..(34): n is a, c, g, or t
  misc_feature (43)..(44): n is a, c, g, or t
  misc_feature (53)..(54): n is a, c, g, or t
tttttttaagcagtggtatcaacgcagagtacnngcctatctnnaactaggcnntttttttttttttttttttttttttttttt

SEQ ID NO: 1676 - DNA, 84 bp, Artificial
  Barcode component
  misc_feature (33)..(34): n is a, c, g, or t
  misc_feature (43)..(44): n is a, c, g, or t
  misc_feature (53)..(54): n is a, c, g, or t
tttttttaagcagtggtatcaacgcagagtacnngcctatctnncagcaagtnntttttttttttttttttttttttttttttt

SEQ ID NO: 1677 - DNA, 84 bp, Artificial
  Barcode component
  misc_feature (33)..(34): n is a, c, g, or t
  misc_feature (43)..(44): n is a, c, g, or t
  misc_feature (53)..(54): n is a, c, g, or t
tttttttaagcagtggtatcaacgcagagtacnngcctatctnnacgaggtanntttttttttttttttttttttttttttttt

SEQ ID NO: 1678 - DNA, 84 bp, Artificial
  Barcode component
  misc_feature (33)..(34): n is a, c, g, or t
  misc_feature (43)..(44): n is a, c, g, or t
  misc_feature (53)..(54): n is a, c, g, or t
tttttttaagcagtggtatcaacgcagagtacnngcctatctnncatcttccnntttttttttttttttttttttttttttttt

SEQ ID NO: 1679 - DNA, 84 bp, Artificial
  Barcode component
  misc_feature (33)..(34): n is a, c, g, or t
  misc_feature (43)..(44): n is a, c, g, or t
  misc_feature (53)..(54): n is a, c, g, or t
tttttttaagcagtggtatcaacgcagagtacnngcctatctnncctgaatcnntttttttttttttttttttttttttttttt

SEQ ID NO: 1680 - DNA, 84 bp, Artificial
  Barcode component
  misc_feature (33)..(34): n is a, c, g, or t
  misc_feature (43)..(44): n is a, c, g, or t
  misc_feature (53)..(54): n is a, c, g, or t
tttttttaagcagtggtatcaacgcagagtacnngcctatctnntgcagactnntttttttttttttttttttttttttttttt

SEQ ID NO: 1681 - DNA, 84 bp, Artificial
  Barcode component
  misc_feature (33)..(34): n is a, c, g, or t
  misc_feature (43)..(44): n is a, c, g, or t
  misc_feature (53)..(54): n is a, c, g, or t
tttttttaagcagtggtatcaacgcagagtacnngcctatctnnagatgtggnntttttttttttttttttttttttttttttt

SEQ ID NO: 1682 - DNA, 84 bp, Artificial
  Barcode component
  misc_feature (33)..(34): n is a, c, g, or t
  misc_feature (43)..(44): n is a, c, g, or t
  misc_feature (53)..(54): n is a, c, g, or t
tttttttaagcagtggtatcaacgcagagtacnngcctatctnnagttcgacnntttttttttttttttttttttttttttttt

SEQ ID NO: 1683 - DNA, 84 bp, Artificial
  Barcode component
  misc_feature (33)..(34): n is a, c, g, or t
  misc_feature (43)..(44): n is a, c, g, or t
  misc_feature (53)..(54): n is a, c, g, or t
tttttttaagcagtggtatcaacgcagagtacnngcctatctnnacaacctcnntttttttttttttttttttttttttttttt

SEQ ID NO: 1684 - DNA, 84 bp, Artificial
  Barcode component
  misc_feature (33)..(34): n is a, c, g, or t
  misc_feature (43)..(44): n is a, c, g, or t
  misc_feature (53)..(54): n is a, c, g, or t
tttttttaagcagtggtatcaacgcagagtacnngcctatctnncatggtagnntttttttttttttttttttttttttttttt

SEQ ID NO: 1685 - DNA, 84 bp, Artificial
  Barcode component
  misc_feature (33)..(34): n is a, c, g, or t
  misc_feature (43)..(44): n is a, c, g, or t
  misc_feature (53)..(54): n is a, c, g, or t
tttttttaagcagtggtatcaacgcagagtacnngcctatctnncgtatctcnntttttttttttttttttttttttttttttt

SEQ ID NO: 1686 - DNA, 84 bp, Artificial
  Barcode component
  misc_feature (33)..(34): n is a, c, g, or t
  misc_feature (43)..(44): n is a, c, g, or t
  misc_feature (53)..(54): n is a, c, g, or t
tttttttaagcagtggtatcaacgcagagtacnngcctatctnncctagttcnntttttttttttttttttttttttttttttt

SEQ ID NO: 1687 - DNA, 84 bp, Artificial
  Barcode component
  misc_feature (33)..(34): n is a, c, g, or t
  misc_feature (43)..(44): n is a, c, g, or t
  misc_feature (53)..(54): n is a, c, g, or t
tttttttaagcagtggtatcaacgcagagtacnngcctatctnncaagagtcnntttttttttttttttttttttttttttttt

SEQ ID NO: 1688 - DNA, 84 bp, Artificial
  Barcode component
  misc_feature (33)..(34): n is a, c, g, or t
  misc_feature (43)..(44): n is a, c, g, or t
  misc_feature (53)..(54): n is a, c, g, or t
tttttttaagcagtggtatcaacgcagagtacnntggtgagannaatcggcanntttttttttttttttttttttttttttttt

SEQ ID NO: 1689 - DNA, 84 bp, Artificial
  Barcode component
  misc_feature (33)..(34): n is a, c, g, or t
  misc_feature (43)..(44): n is a, c, g, or t
  misc_feature (53)..(54): n is a, c, g, or t
tttttttaagcagtggtatcaacgcagagtacnntggtgaganntacggcatnntttttttttttttttttttttttttttttt

SEQ ID NO: 1690 - DNA, 84 bp, Artificial
  Barcode component
  misc_feature (33)..(34): n is a, c, g, or t
  misc_feature (43)..(44): n is a, c, g, or t
  misc_feature (53)..(54): n is a, c, g, or t
tttttttaagcagtggtatcaacgcagagtacnntggtgagannttggatcgnntttttttttttttttttttttttttttttt

SEQ ID NO: 1691 - DNA, 84 bp, Artificial
  Barcode component
  misc_feature (33)..(34): n is a, c, g, or t
  misc_feature (43)..(44): n is a, c, g, or t
  misc_feature (53)..(54): n is a, c, g, or t
tttttttaagcagtggtatcaacgcagagtacnntggtgaganntggaacganntttttttttttttttttttttttttttttt

SEQ ID NO: 1692 - DNA, 84 bp, Artificial
  Barcode component
  misc_feature (33)..(34): n is a, c, g, or t
  misc_feature (43)..(44): n is a, c, g, or t
  misc_feature (53)..(54): n is a, c, g, or t
tttttttaagcagtggtatcaacgcagagtacnntggtgagannggcaatcanntttttttttttttttttttttttttttttt

SEQ ID NO: 1693 - DNA, 84 bp, Artificial
  Barcode component
  misc_feature (33)..(34): n is a, c, g, or t
  misc_feature (43)..(44): n is a, c, g, or t
  misc_feature (53)..(54): n is a, c, g, or t
tttttttaagcagtggtatcaacgcagagtacnntggtgaganngaatccganntttttttttttttttttttttttttttttt

SEQ ID NO: 1694 - DNA, 84 bp, Artificial
  Barcode component
  misc_feature (33)..(34): n is a, c, g, or t
  misc_feature (43)..(44): n is a, c, g, or t
  misc_feature (53)..(54): n is a, c, g, or t
tttttttaagcagtggtatcaacgcagagtacnntggtgagannttacggtgnntttttttttttttttttttttttttttttt

SEQ ID NO: 1695 - DNA, 84 bp, Artificial
  Barcode component
  misc_feature (33)..(34): n is a, c, g, or t
  misc_feature (43)..(44): n is a, c, g, or t
  misc_feature (53)..(54): n is a, c, g, or t
tttttttaagcagtggtatcaacgcagagtacnntggtgaganncatatcggnntttttttttttttttttttttttttttttt

SEQ ID NO: 1696 - DNA, 84 bp, Artificial
  Barcode component
  misc_feature (33)..(34): n is a, c, g, or t
  misc_feature (43)..(44): n is a, c, g, or t
  misc_feature (53)..(54): n is a, c, g, or t
tttttttaagcagtggtatcaacgcagagtacnntggtgaganncttcggtanntttttttttttttttttttttttttttttt

SEQ ID NO: 1697 - DNA, 84 bp, Artificial
  Barcode component
  misc_feature (33)..(34): n is a, c, g, or t
  misc_feature (43)..(44): n is a, c, g, or t
  misc_feature (53)..(54): n is a, c, g, or t
tttttttaagcagtggtatcaacgcagagtacnntggtgaganntcctaacgnntttttttttttttttttttttttttttttt

SEQ ID NO: 1698 - DNA, 84 bp, Artificial
  Barcode component
  misc_feature (33)..(34): n is a, c, g, or t
  misc_feature (43)..(44): n is a, c, g, or t
  misc_feature (53)..(54): n is a, c, g, or t
tttttttaagcagtggtatcaacgcagagtacnntggtgaganngtaagccanntttttttttttttttttttttttttttttt

SEQ ID NO: 1699 - DNA, 84 bp, Artificial
  Barcode component
  misc_feature (33)..(34): n is a, c, g, or t
  misc_feature (43)..(44): n is a, c, g, or t
  misc_feature (53)..(54): n is a, c, g, or t
tttttttaagcagtggtatcaacgcagagtacnntggtgaganntaaggtggnntttttttttttttttttttttttttttttt

SEQ ID NO: 1700 - DNA, 84 bp, Artificial
  Barcode component
  misc_feature (33)..(34): n is a, c, g, or t
  misc_feature (43)..(44): n is a, c, g, or t
  misc_feature (53)..(54): n is a, c, g, or t
tttttttaagcagtggtatcaacgcagagtacnntggtgagannggtaagctnntttttttttttttttttttttttttttttt

SEQ ID NO: 1701 - DNA, 84 bp, Artificial
  Barcode component
  misc_feature (33)..(34): n is a, c, g, or t
  misc_feature (43)..(44): n is a, c, g, or t
  misc_feature (53)..(54): n is a, c, g, or t
tttttttaagcagtggtatcaacgcagagtacnntggtgaganntgtgtcganntttttttttttttttttttttttttttttt

SEQ ID NO: 1702 - DNA, 84 bp, Artificial
  Barcode component
  misc_feature (33)..(34): n is a, c, g, or t
  misc_feature (43)..(44): n is a, c, g, or t
  misc_feature (53)..(54): n is a, c, g, or t
tttttttaagcagtggtatcaacgcagagtacnntggtgaganngagcatganntttttttttttttttttttttttttttttt

SEQ ID NO: 1703 - DNA, 84 bp, Artificial
  Barcode component
  misc_feature (33)..(34): n is a, c, g, or t
  misc_feature (43)..(44): n is a, c, g, or t
  misc_feature (53)..(54): n is a, c, g, or t
tttttttaagcagtggtatcaacgcagagtacnntggtgaganntcgaagtcnntttttttttttttttttttttttttttttt

SEQ ID NO: 1704 - DNA, 84 bp, Artificial
  Barcode component
  misc_feature (33)..(34): n is a, c, g, or t
  misc_feature (43)..(44): n is a, c, g, or t
  misc_feature (53)..(54): n is a, c, g, or t
tttttttaagcagtggtatcaacgcagagtacnntggtgagannggtgaacanntttttttttttttttttttttttttttttt

SEQ ID NO: 1705 - DNA, 84 bp, Artificial
  Barcode component
  misc_feature (33)..(34): n is a, c, g, or t
  misc_feature (43)..(44): n is a, c, g, or t
  misc_feature (53)..(54): n is a, c, g, or t
tttttttaagcagtggtatcaacgcagagtacnntggtgagannacatgcacnntttttttttttttttttttttttttttttt

SEQ ID NO: 1706 - DNA, 84 bp, Artificial
  Barcode component
  misc_feature (33)..(34): n is a, c, g, or t
  misc_feature (43)..(44): n is a, c, g, or t
  misc_feature (53)..(54): n is a, c, g, or t
tttttttaagcagtggtatcaacgcagagtacnntggtgagannccaacagtnntttttttttttttttttttttttttttttt

SEQ ID NO: 1707 - DNA, 84 bp, Artificial
  Barcode component
  misc_feature (33)..(34): n is a, c, g, or t
  misc_feature (43)..(44): n is a, c, g, or t
  misc_feature (53)..(54): n is a, c, g, or t
tttttttaagcagtggtatcaacgcagagtacnntggtgagannagaacagcnntttttttttttttttttttttttttttttt

SEQ ID NO: 1708 - DNA, 84 bp, Artificial
  Barcode component
  misc_feature (33)..(34): n is a, c, g, or t
  misc_feature (43)..(44): n is a, c, g, or t
  misc_feature (53)..(54): n is a, c, g, or t
tttttttaagcagtggtatcaacgcagagtacnntggtgaganngaacacgtnntttttttttttttttttttttttttttttt

SEQ ID NO: 1709 - DNA, 84 bp, Artificial
  Barcode component
  misc_feature (33)..(34): n is a, c, g, or t
  misc_feature (43)..(44): n is a, c, g, or t
  misc_feature (53)..(54): n is a, c, g, or t
tttttttaagcagtggtatcaacgcagagtacnntggtgagannggtcttcanntttttttttttttttttttttttttttttt

SEQ ID NO: 1710 - DNA, 84 bp, Artificial
  Barcode component
  misc_feature (33)..(34): n is a, c, g, or t
  misc_feature (43)..(44): n is a, c, g, or t
  misc_feature (53)..(54): n is a, c, g, or t
tttttttaagcagtggtatcaacgcagagtacnntggtgagannaggttcagnntttttttttttttttttttttttttttttt

SEQ ID NO: 1711 - DNA, 84 bp, Artificial
  Barcode component
  misc_feature (33)..(34): n is a, c, g, or t
  misc_feature (43)..(44): n is a, c, g, or t
  misc_feature (53)..(54): n is a, c, g, or t
tttttttaagcagtggtatcaacgcagagtacnntggtgagannctagagcanntttttttttttttttttttttttttttttt

SEQ ID NO: 1712 - DNA, 84 bp, Artificial
  Barcode component
  misc_feature (33)..(34): n is a, c, g, or t
  misc_feature (43)..(44): n is a, c, g, or t
  misc_feature (53)..(54): n is a, c, g, or t
tttttttaagcagtggtatcaacgcagagtacnntggtgaganncttctagcnntttttttttttttttttttttttttttttt

SEQ ID NO: 1713 - DNA, 84 bp, Artificial
  Barcode component
  misc_feature (33)..(34): n is a, c, g, or t
  misc_feature (43)..(44): n is a, c, g, or t
  misc_feature (53)..(54): n is a, c, g, or t
tttttttaagcagtggtatcaacgcagagtacnntggtgaganngagtaacgnntttttttttttttttttttttttttttttt

SEQ ID NO: 1714 - DNA, 84 bp, Artificial
  Barcode component
  misc_feature (33)..(34): n is a, c, g, or t
  misc_feature (43)..(44): n is a, c, g, or t
  misc_feature (53)..(54): n is a, c, g, or t
tttttttaagcagtggtatcaacgcagagtacnntggtgagannctaagaggnntttttttttttttttttttttttttttttt

SEQ ID NO: 1715 - DNA, 84 bp, Artificial
  Barcode component
  misc_feature (33)..(34): n is a, c, g, or t
  misc_feature (43)..(44): n is a, c, g, or t
  misc_feature (53)..(54): n is a, c, g, or t
tttttttaagcagtggtatcaacgcagagtacnntggtgagannacgtgtagnntttttttttttttttttttttttttttttt

SEQ ID NO: 1716 - DNA, 84 bp, Artificial
  Barcode component
  misc_feature (33)..(34): n is a, c, g, or t
  misc_feature (43)..(44): n is a, c, g, or t
  misc_feature (53)..(54): n is a, c, g, or t
tttttttaagcagtggtatcaacgcagagtacnntggtgagannactacaggnntttttttttttttttttttttttttttttt

SEQ ID NO: 1717 - DNA, 84 bp, Artificial
  Barcode component
  misc_feature (33)..(34): n is a, c, g, or t
  misc_feature (43)..(44): n is a, c, g, or t
  misc_feature (53)..(54): n is a, c, g, or t
tttttttaagcagtggtatcaacgcagagtacnntggtgaganntacaggtcnntttttttttttttttttttttttttttttt

SEQ ID NO: 1718 - DNA, 84 bp, Artificial
  Barcode component
  misc_feature (33)..(34): n is a, c, g, or t
  misc_feature (43)..(44): n is a, c, g, or t
  misc_feature (53)..(54): n is a, c, g, or t
tttttttaagcagtggtatcaacgcagagtacnntggtgagannctcacatgnntttttttttttttttttttttttttttttt

SEQ ID NO: 1719 - DNA, 84 bp, Artificial
  Barcode component
  misc_feature (33)..(34): n is a, c, g, or t
  misc_feature (43)..(44): n is a, c, g, or t
  misc_feature (53)..(54): n is a, c, g, or t
tttttttaagcagtggtatcaacgcagagtacnntggtgagannactaggagnntttttttttttttttttttttttttttttt

SEQ ID NO: 1720 - DNA, 84 bp, Artificial
  Barcode component
  misc_feature (33)..(34): n is a, c, g, or t
  misc_feature (43)..(44): n is a, c, g, or t
  misc_feature (53)..(54): n is a, c, g, or t
tttttttaagcagtggtatcaacgcagagtacnntggtgagannccatagganntttttttttttttttttttttttttttttt

SEQ ID NO: 1721 - DNA, 84 bp, Artificial
  Barcode component
  misc_feature (33)..(34): n is a, c, g, or t
  misc_feature (43)..(44): n is a, c, g, or t
  misc_feature (53)..(54): n is a, c, g, or t
tttttttaagcagtggtatcaacgcagagtacnntggtgagannggagaatcnntttttttttttttttttttttttttttttt

SEQ ID NO: 1722 - DNA, 84 bp, Artificial
  Barcode component
  misc_feature (33)..(34): n is a, c, g, or t
  misc_feature (43)..(44): n is a, c, g, or t
  misc_feature (53)..(54): n is a, c, g, or t
tttttttaagcagtggtatcaacgcagagtacnntggtgaganngccaagaanntttttttttttttttttttttttttttttt

SEQ ID NO: 1723 - DNA, 84 bp, Artificial
  Barcode component
  misc_feature (33)..(34): n is a, c, g, or t
  misc_feature (43)..(44): n is a, c, g, or t
  misc_feature (53)..(54): n is a, c, g, or t
tttttttaagcagtggtatcaacgcagagtacnntggtgagannaaggcaagnntttttttttttttttttttttttttttttt

SEQ ID NO: 1724 - DNA, 84 bp, Artificial
  Barcode component
  misc_feature (33)..(34): n is a, c, g, or t
  misc_feature (43)..(44): n is a, c, g, or t
  misc_feature (53)..(54): n is a, c, g, or t
tttttttaagcagtggtatcaacgcagagtacnntggtgagannaatgtcgcnntttttttttttttttttttttttttttttt

SEQ ID NO: 1725 - DNA, 84 bp, Artificial
  Barcode component
  misc_feature (33)..(34): n is a, c, g, or t
  misc_feature (43)..(44): n is a, c, g, or t
  misc_feature (53)..(54): n is a, c, g, or t
tttttttaagcagtggtatcaacgcagagtacnntggtgagannatggaaccnntttttttttttttttttttttttttttttt

SEQ ID NO: 1726 - DNA, 84 bp, Artificial
  Barcode component
  misc_feature (33)..(34): n is a, c, g, or t
  misc_feature (43)..(44): n is a, c, g, or t
  misc_feature (53)..(54): n is a, c, g, or t
tttttttaagcagtggtatcaacgcagagtacnntggtgagannagaggcatnntttttttttttttttttttttttttttttt

SEQ ID NO: 1727 - DNA, 84 bp, Artificial
  Barcode component
  misc_feature (33)..(34): n is a, c, g, or t
  misc_feature (43)..(44): n is a, c, g, or t
  misc_feature (53)..(54): n is a, c, g, or t
tttttttaagcagtggtatcaacgcagagtacnntggtgaganntgcatagcnntttttttttttttttttttttttttttttt

SEQ ID NO: 1728 - DNA, 84 bp, Artificial
  Barcode component
  misc_feature (33)..(34): n is a, c, g, or t
  misc_feature (43)..(44): n is a, c, g, or t
  misc_feature (53)..(54): n is a, c, g, or t
tttttttaagcagtggtatcaacgcagagtacnntggtgagannctaacgganntttttttttttttttttttttttttttttt

SEQ ID NO: 1729 - DNA, 84 bp, Artificial
  Barcode component
  misc_feature (33)..(34): n is a, c, g, or t
  misc_feature (43)..(44): n is a, c, g, or t
  misc_feature (53)..(54): n is a, c, g, or t
tttttttaagcagtggtatcaacgcagagtacnntggtgaganntatcgaggnntttttttttttttttttttttttttttttt

SEQ ID NO: 1730 - DNA, 84 bp, Artificial
  Barcode component
  misc_feature (33)..(34): n is a, c, g, or t
  misc_feature (43)..(44): n is a, c, g, or t
  misc_feature (53)..(54): n is a, c, g, or t
tttttttaagcagtggtatcaacgcagagtacnntggtgaganncatagcctnntttttttttttttttttttttttttttttt

SEQ ID NO: 1731 - DNA, 84 bp, Artificial
  Barcode component
  misc_feature (33)..(34): n is a, c, g, or t
  misc_feature (43)..(44): n is a, c, g, or t
  misc_feature (53)..(54): n is a, c, g, or t
tttttttaagcagtggtatcaacgcagagtacnntggtgagannatcgagacnntttttttttttttttttttttttttttttt

SEQ ID NO: 1732 - DNA, 84 bp, Artificial
  Barcode component
  misc_feature (33)..(34): n is a, c, g, or t
  misc_feature (43)..(44): n is a, c, g, or t
  misc_feature (53)..(54): n is a, c, g, or t
tttttttaagcagtggtatcaacgcagagtacnntggtgagannggaagagtnntttttttttttttttttttttttttttttt

SEQ ID NO: 1733 - DNA, 84 bp, Artificial
  Barcode component
  misc_feature (33)..(34): n is a, c, g, or t
  misc_feature (43)..(44): n is a, c, g, or t
  misc_feature (53)..(54): n is a, c, g, or t
tttttttaagcagtggtatcaacgcagagtacnntggtgagannccaagtagnntttttttttttttttttttttttttttttt

SEQ ID NO: 1734 - DNA, 84 bp, Artificial
  Barcode component
  misc_feature (33)..(34): n is a, c, g, or t
  misc_feature (43)..(44): n is a, c, g, or t
  misc_feature (53)..(54): n is a, c, g, or t
tttttttaagcagtggtatcaacgcagagtacnntggtgagannctgaacagnntttttttttttttttttttttttttttttt

SEQ ID NO: 1735 - DNA, 84 bp, Artificial
  Barcode component
  misc_feature (33)..(34): n is a, c, g, or t
  misc_feature (43)..(44): n is a, c, g, or t
  misc_feature (53)..(54): n is a, c, g, or t
tttttttaagcagtggtatcaacgcagagtacnntggtgaganngtaggttcnntttttttttttttttttttttttttttttt

SEQ ID NO: 1736 - DNA, 84 bp, Artificial
  Barcode component
  misc_feature (33)..(34): n is a, c, g, or t
  misc_feature (43)..(44): n is a, c, g, or t
  misc_feature (53)..(54): n is a, c, g, or t
tttttttaagcagtggtatcaacgcagagtacnntggtgaganngtatggacnntttttttttttttttttttttttttttttt

SEQ ID NO: 1737 - DNA, 84 bp, Artificial
  Barcode component
  misc_feature (33)..(34): n is a, c, g, or t
  misc_feature (43)..(44): n is a, c, g, or t
  misc_feature (53)..(54): n is a, c, g, or t
tttttttaagcagtggtatcaacgcagagtacnntggtgaganntcgcaacanntttttttttttttttttttttttttttttt

SEQ ID NO: 1738 - DNA, 84 bp, Artificial
  Barcode component
  misc_feature (33)..(34): n is a, c, g, or t
  misc_feature (43)..(44): n is a, c, g, or t
  misc_feature (53)..(54): n is a, c, g, or t
tttttttaagcagtggtatcaacgcagagtacnntggtgagannccgctaatnntttttttttttttttttttttttttttttt

SEQ ID NO: 1739 - DNA, 84 bp, Artificial
  Barcode component
  misc_feature (33)..(34): n is a, c, g, or t
  misc_feature (43)..(44): n is a, c, g, or t
  misc_feature (53)..(54): n is a, c, g, or t
tttttttaagcagtggtatcaacgcagagtacnntggtgaganngattcgcanntttttttttttttttttttttttttttttt

SEQ ID NO: 1740 - DNA, 84 bp, Artificial
  Barcode component
  misc_feature (33)..(34): n is a, c, g, or t
  misc_feature (43)..(44): n is a, c, g, or t
  misc_feature (53)..(54): n is a, c, g, or t
tttttttaagcagtggtatcaacgcagagtacnntggtgaganncgatggaanntttttttttttttttttttttttttttttt

SEQ ID NO: 1741 - DNA, 84 bp, Artificial
  Barcode component
  misc_feature (33)..(34): n is a, c, g, or t
  misc_feature (43)..(44): n is a, c, g, or t
  misc_feature (53)..(54): n is a, c, g, or t
tttttttaagcagtggtatcaacgcagagtacnntggtgagannagcaagganntttttttttttttttttttttttttttttt

SEQ ID NO: 1742 - DNA, 84 bp, Artificial
  Barcode component
  misc_feature (33)..(34): n is a, c, g, or t
  misc_feature (43)..(44): n is a, c, g, or t
  misc_feature (53)..(54): n is a, c, g, or t
tttttttaagcagtggtatcaacgcagagtacnntggtgaganncgtagcaanntttttttttttttttttttttttttttttt

SEQ ID NO: 1743 - DNA, 84 bp, Artificial
  Barcode component
  misc_feature (33)..(34): n is a, c, g, or t
  misc_feature (43)..(44): n is a, c, g, or t
  misc_feature (53)..(54): n is a, c, g, or t
tttttttaagcagtggtatcaacgcagagtacnntggtgaganntggcagtanntttttttttttttttttttttttttttttt

SEQ ID NO: 1744 - DNA, 84 bp, Artificial
  Barcode component
  misc_feature (33)..(34): n is a, c, g, or t
  misc_feature (43)..(44): n is a, c, g, or t
  misc_feature (53)..(54): n is a, c, g, or t
tttttttaagcagtggtatcaacgcagagtacnntggtgaganncggtagttnntttttttttttttttttttttttttttttt

SEQ ID NO: 1745 - DNA, 84 bp, Artificial
  Barcode component
  misc_feature (33)..(34): n is a, c, g, or t
  misc_feature (43)..(44): n is a, c, g, or t
  misc_feature (53)..(54): n is a, c, g, or t
tttttttaagcagtggtatcaacgcagagtacnntggtgaganntgacttcgnntttttttttttttttttttttttttttttt

SEQ ID NO: 1746 - DNA, 84 bp, Artificial
  Barcode component
  misc_feature (33)..(34): n is a, c, g, or t
  misc_feature (43)..(44): n is a, c, g, or t
  misc_feature (53)..(54): n is a, c, g, or t
tttttttaagcagtggtatcaacgcagagtacnntggtgaganngagtgcaanntttttttttttttttttttttttttttttt

SEQ ID NO: 1747 - DNA, 84 bp, Artificial
  Barcode component
  misc_feature (33)..(34): n is a, c, g, or t
  misc_feature (43)..(44): n is a, c, g, or t
  misc_feature (53)..(54): n is a, c, g, or t
tttttttaagcagtggtatcaacgcagagtacnntggtgagannacggtaacnntttttttttttttttttttttttttttttt

SEQ ID NO: 1748 - DNA, 84 bp, Artificial
  Barcode component
  misc_feature (33)..(34): n is a, c, g, or t
  misc_feature (43)..(44): n is a, c, g, or t
  misc_feature (53)..(54): n is a, c, g, or t
tttttttaagcagtggtatcaacgcagagtacnntggtgagannaagtggtgnntttttttttttttttttttttttttttttt

SEQ ID NO: 1749 - DNA, 84 bp, Artificial
  Barcode component
  misc_feature (33)..(34): n is a, c, g, or t
  misc_feature (43)..(44): n is a, c, g, or t
  misc_feature (53)..(54): n is a, c, g, or t
tttttttaagcagtggtatcaacgcagagtacnntggtgagannggagacaanntttttttttttttttttttttttttttttt

SEQ ID NO: 1750 - DNA, 84 bp, Artificial
  Barcode component
  misc_feature (33)..(34): n is a, c, g, or t
  misc_feature (43)..(44): n is a, c, g, or t
  misc_feature (53)..(54): n is a, c, g, or t
tttttttaagcagtggtatcaacgcagagtacnntggtgaganntcaaggacnntttttttttttttttttttttttttttttt

SEQ ID NO: 1751 - DNA, 84 bp, Artificial
  Barcode component
  misc_feature (33)..(34): n is a, c, g, or t
  misc_feature (43)..(44): n is a, c, g, or t
  misc_feature (53)..(54): n is a, c, g, or t
tttttttaagcagtggtatcaacgcagagtacnntggtgagannaagagagcnntttttttttttttttttttttttttttttt

SEQ ID NO: 1752 - DNA, 84 bp, Artificial
  Barcode component
  misc_feature (33)..(34): n is a, c, g, or t
  misc_feature (43)..(44): n is a, c, g, or t
  misc_feature (53)..(54): n is a, c, g, or t
tttttttaagcagtggtatcaacgcagagtacnntggtgaganncgagagatnntttttttttttttttttttttttttttttt

SEQ ID NO: 1753 - DNA, 84 bp, Artificial
  Barcode component
  misc_feature (33)..(34): n is a, c, g, or t
  misc_feature (43)..(44): n is a, c, g, or t
  misc_feature (53)..(54): n is a, c, g, or t
tttttttaagcagtggtatcaacgcagagtacnntggtgagannacagatggnntttttttttttttttttttttttttttttt

SEQ ID NO: 1754 - DNA, 84 bp, Artificial
  Barcode component
  misc_feature (33)..(34): n is a, c, g, or t
  misc_feature (43)..(44): n is a, c, g, or t
  misc_feature (53)..(54): n is a, c, g, or t
tttttttaagcagtggtatcaacgcagagtacnntggtgagannaggagtcanntttttttttttttttttttttttttttttt

SEQ ID NO: 1755 - DNA, 84 bp, Artificial
  Barcode component
  misc_feature (33)..(34): n is a, c, g, or t
  misc_feature (43)..(44): n is a, c, g, or t
  misc_feature (53)..(54): n is a, c, g, or t
tttttttaagcagtggtatcaacgcagagtacnntggtgaganncgtgttacnntttttttttttttttttttttttttttttt

SEQ ID NO: 1756 - DNA, 84 bp, Artificial
  Barcode component
  misc_feature (33)..(34): n is a, c, g, or t
  misc_feature (43)..(44): n is a, c, g, or t
  misc_feature (53)..(54): n is a, c, g, or t
tttttttaagcagtggtatcaacgcagagtacnntggtgaganntagtgtgcnntttttttttttttttttttttttttttttt

SEQ ID NO: 1757 - DNA, 84 bp, Artificial
  Barcode component
  misc_feature (33)..(34): n is a, c, g, or t
  misc_feature (43)..(44): n is a, c, g, or t
  misc_feature (53)..(54): n is a, c, g, or t
tttttttaagcagtggtatcaacgcagagtacnntggtgagannctcatgacnntttttttttttttttttttttttttttttt

SEQ ID NO: 1758 - DNA, 84 bp, Artificial
  Barcode component
  misc_feature (33)..(34): n is a, c, g, or t
  misc_feature (43)..(44): n is a, c, g, or t
  misc_feature (53)..(54): n is a, c, g, or t
tttttttaagcagtggtatcaacgcagagtacnntggtgaganngtatccagnntttttttttttttttttttttttttttttt

SEQ ID NO: 1759 - DNA, 84 bp, Artificial
  Barcode component
  misc_feature (33)..(34): n is a, c, g, or t
  misc_feature (43)..(44): n is a, c, g, or t
  misc_feature (53)..(54): n is a, c, g, or t
tttttttaagcagtggtatcaacgcagagtacnntggtgagannacgcctatnntttttttttttttttttttttttttttttt

SEQ ID NO: 1760 - DNA, 84 bp, Artificial
  Barcode component
  misc_feature (33)..(34): n is a, c, g, or t
  misc_feature (43)..(44): n is a, c, g, or t
  misc_feature (53)..(54): n is a, c, g, or t
tttttttaagcagtggtatcaacgcagagtacnntggtgagannaacgacctnntttttttttttttttttttttttttttttt

SEQ ID NO: 1761 - DNA, 84 bp, Artificial
  Barcode component
  misc_feature (33)..(34): n is a, c, g, or t
  misc_feature (43)..(44): n is a, c, g, or t
  misc_feature (53)..(54): n is a, c, g, or t
tttttttaagcagtggtatcaacgcagagtacnntggtgagannatcaggctnntttttttttttttttttttttttttttttt

SEQ ID NO: 1762 - DNA, 84 bp, Artificial
  Barcode component
  misc_feature (33)..(34): n is a, c, g, or t
  misc_feature (43)..(44): n is a, c, g, or t
  misc_feature (53)..(54): n is a, c, g, or t
tttttttaagcagtggtatcaacgcagagtacnntggtgaganncaagttcgnntttttttttttttttttttttttttttttt

SEQ ID NO: 1763 - DNA, 84 bp, Artificial
  Barcode component
  misc_feature (33)..(34): n is a, c, g, or t
  misc_feature (43)..(44): n is a, c, g, or t
  misc_feature (53)..(54): n is a, c, g, or t
tttttttaagcagtggtatcaacgcagagtacnntggtgaganntagccaganntttttttttttttttttttttttttttttt

SEQ ID NO: 1764 - DNA, 84 bp, Artificial
  Barcode component
  misc_feature (33)..(34): n is a, c, g, or t
  misc_feature (43)..(44): n is a, c, g, or t
  misc_feature (53)..(54): n is a, c, g, or t
tttttttaagcagtggtatcaacgcagagtacnntggtgaganncaatcacgnntttttttttttttttttttttttttttttt

SEQ ID NO: 1765 - DNA, 84 bp, Artificial
  Barcode component
  misc_feature (33)..(34): n is a, c, g, or t
  misc_feature (43)..(44): n is a, c, g, or t
  misc_feature (53)..(54): n is a, c, g, or t
tttttttaagcagtggtatcaacgcagagtacnntggtgaganngcaacaagnntttttttttttttttttttttttttttttt

SEQ ID NO: 1766 - DNA, 84 bp, Artificial
  Barcode component
  misc_feature (33)..(34): n is a, c, g, or t
  misc_feature (43)..(44): n is a, c, g, or t
  misc_feature (53)..(54): n is a, c, g, or t
tttttttaagcagtggtatcaacgcagagtacnntggtgaganncacgacaanntttttttttttttttttttttttttttttt

SEQ ID NO: 1767 - DNA, 84 bp, Artificial
  Barcode component
  misc_feature (33)..(34): n is a, c, g, or t
  misc_feature (43)..(44): n is a, c, g, or t
  misc_feature (53)..(54): n is a, c, g, or t
tttttttaagcagtggtatcaacgcagagtacnntggtgaganntacggaganntttttttttttttttttttttttttttttt

SEQ ID NO: 1768 - DNA, 84 bp, Artificial
  Barcode component
  misc_feature (33)..(34): n is a, c, g, or t
  misc_feature (43)..(44): n is a, c, g, or t
  misc_feature (53)..(54): n is a, c, g, or t
tttttttaagcagtggtatcaacgcagagtacnntggtgaganncgacaaganntttttttttttttttttttttttttttttt

SEQ ID NO: 1769 - DNA, 84 bp, Artificial
  Barcode component
  misc_feature (33)..(34): n is a, c, g, or t
  misc_feature (43)..(44): n is a, c, g, or t
  misc_feature (53)..(54): n is a, c, g, or t
tttttttaagcagtggtatcaacgcagagtacnntggtgaganncgaagtganntttttttttttttttttttttttttttttt

SEQ ID NO: 1770 - DNA, 84 bp, Artificial
  Barcode component
  misc_feature (33)..(34): n is a, c, g, or t
  misc_feature (43)..(44): n is a, c, g, or t
  misc_feature (53)..(54): n is a, c, g, or t
tttttttaagcagtggtatcaacgcagagtacnntggtgagannagctggtanntttttttttttttttttttttttttttttt

SEQ ID NO: 1771 - DNA, 84 bp, Artificial
  Barcode component
  misc_feature (33)..(34): n is a, c, g, or t
  misc_feature (43)..(44): n is a, c, g, or t
  misc_feature (53)..(54): n is a, c, g, or t
tttttttaagcagtggtatcaacgcagagtacnntggtgagannaactaggcnntttttttttttttttttttttttttttttt

SEQ ID NO: 1772 - DNA, 84 bp, Artificial
  Barcode component
  misc_feature (33)..(34): n is a, c, g, or t
  misc_feature (43)..(44): n is a, c, g, or t
  misc_feature (53)..(54): n is a, c, g, or t
tttttttaagcagtggtatcaacgcagagtacnntggtgaganncagcaagtnntttttttttttttttttttttttttttttt

SEQ ID NO: 1773 - DNA, 84 bp, Artificial
  Barcode component
  misc_feature (33)..(34): n is a, c, g, or t
  misc_feature (43)..(44): n is a, c, g, or t
  misc_feature (53)..(54): n is a, c, g, or t
tttttttaagcagtggtatcaacgcagagtacnntggtgagannacgaggtanntttttttttttttttttttttttttttttt

SEQ ID NO: 1774 - DNA, 84 bp, Artificial
  Barcode component
  misc_feature (33)..(34): n is a, c, g, or t
  misc_feature (43)..(44): n is a, c, g, or t
  misc_feature (53)..(54): n is a, c, g, or t
tttttttaagcagtggtatcaacgcagagtacnntggtgaganncatcttccnntttttttttttttttttttttttttttttt

SEQ ID NO: 1775 - DNA, 84 bp, Artificial
  Barcode component
  misc_feature (33)..(34): n is a, c, g, or t
  misc_feature (43)..(44): n is a, c, g, or t
  misc_feature (53)..(54): n is a, c, g, or t
tttttttaagcagtggtatcaacgcagagtacnntggtgaganncctgaatcnntttttttttttttttttttttttttttttt

SEQ ID NO: 1776 - DNA, 84 bp, Artificial
  Barcode component
  misc_feature (33)..(34): n is a, c, g, or t
  misc_feature (43)..(44): n is a, c, g, or t
  misc_feature (53)..(54): n is a, c, g, or t
tttttttaagcagtggtatcaacgcagagtacnntggtgaganntgcagactnntttttttttttttttttttttttttttttt

SEQ ID NO: 1777 - DNA, 84 bp, Artificial
  Barcode component
  misc_feature (33)..(34): n is a, c, g, or t
  misc_feature (43)..(44): n is a, c, g, or t
  misc_feature (53)..(54): n is a, c, g, or t
tttttttaagcagtggtatcaacgcagagtacnntggtgagannagatgtggnntttttttttttttttttttttttttttttt

SEQ ID NO: 1778 - DNA, 84 bp, Artificial
  Barcode component
  misc_feature (33)..(34): n is a, c, g, or t
  misc_feature (43)..(44): n is a, c, g, or t
  misc_feature (53)..(54): n is a, c, g, or t
tttttttaagcagtggtatcaacgcagagtacnntggtgagannagttcgacnntttttttttttttttttttttttttttttt

SEQ ID NO: 1779 - DNA, 84 bp, Artificial
  Barcode component
  misc_feature (33)..(34): n is a, c, g, or t
  misc_feature (43)..(44): n is a, c, g, or t
  misc_feature (53)..(54): n is a, c, g, or t
tttttttaagcagtggtatcaacgcagagtacnntggtgagannacaacctcnntttttttttttttttttttttttttttttt

SEQ ID NO: 1780 - DNA, 84 bp, Artificial
  Barcode component
  misc_feature (33)..(34): n is a, c, g, or t
  misc_feature (43)..(44): n is a, c, g, or t
  misc_feature (53)..(54): n is a, c, g, or t
tttttttaagcagtggtatcaacgcagagtacnntggtgaganncatggtagnntttttttttttttttttttttttttttttt

SEQ ID NO: 1781 - DNA, 84 bp, Artificial
  Barcode component
  misc_feature (33)..(34): n is a, c, g, or t
  misc_feature (43)..(44): n is a, c, g, or t
  misc_feature (53)..(54): n is a, c, g, or t
tttttttaagcagtggtatcaacgcagagtacnntggtgaganncgtatctcnntttttttttttttttttttttttttttttt

SEQ ID NO: 1782 - DNA, 84 bp, Artificial
  Barcode component
  misc_feature (33)..(34): n is a, c, g, or t
  misc_feature (43)..(44): n is a, c, g, or t
  misc_feature (53)..(54): n is a, c, g, or t
tttttttaagcagtggtatcaacgcagagtacnntggtgaganncctagttcnntttttttttttttttttttttttttttttt

SEQ ID NO: 1783 - DNA, 84 bp, Artificial
  Barcode component
  misc_feature (33)..(34): n is a, c, g, or t
  misc_feature (43)..(44): n is a, c, g, or t
  misc_feature (53)..(54): n is a, c, g, or t
tttttttaagcagtggtatcaacgcagagtacnntggtgaganncaagagtcnntttttttttttttttttttttttttttttt

SEQ ID NO: 1784 - DNA, 84 bp, Artificial
  Barcode component
  misc_feature (33)..(34): n is a, c, g, or t
  misc_feature (43)..(44): n is a, c, g, or t
  misc_feature (53)..(54): n is a, c, g, or t
tttttttaagcagtggtatcaacgcagagtacnncgatctagnnaatcggcanntttttttttttttttttttttttttttttt

SEQ ID NO: 1785 - DNA, 84 bp, Artificial
  Barcode component
  misc_feature (33)..(34): n is a, c, g, or t
  misc_feature (43)..(44): n is a, c, g, or t
  misc_feature (53)..(54): n is a, c, g, or t
tttttttaagcagtggtatcaacgcagagtacnncgatctagnntacggcatnntttttttttttttttttttttttttttttt

SEQ ID NO: 1786 - DNA, 84 bp, Artificial
  Barcode component
  misc_feature (33)..(34): n is a, c, g, or t
  misc_feature (43)..(44): n is a, c, g, or t
  misc_feature (53)..(54): n is a, c, g, or t
tttttttaagcagtggtatcaacgcagagtacnncgatctagnnttggatcgnntttttttttttttttttttttttttttttt

SEQ ID NO: 1787 - DNA, 84 bp, Artificial
  Barcode component
  misc_feature (33)..(34): n is a, c, g, or t
  misc_feature (43)..(44): n is a, c, g, or t
  misc_feature (53)..(54): n is a, c, g, or t
tttttttaagcagtggtatcaacgcagagtacnncgatctagnntggaacganntttttttttttttttttttttttttttttt

SEQ ID NO: 1788 - DNA, 84 bp, Artificial
  Barcode component
  misc_feature (33)..(34): n is a, c, g, or t
  misc_feature (43)..(44): n is a, c, g, or t
  misc_feature (53)..(54): n is a, c, g, or t
tttttttaagcagtggtatcaacgcagagtacnncgatctagnnggcaatcanntttttttttttttttttttttttttttttt

SEQ ID NO: 1789 - DNA, 84 bp, Artificial
  Barcode component
  misc_feature (33)..(34): n is a, c, g, or t
  misc_feature (43)..(44): n is a, c, g, or t
  misc_feature (53)..(54): n is a, c, g, or t
tttttttaagcagtggtatcaacgcagagtacnncgatctagnngaatccganntttttttttttttttttttttttttttttt

SEQ ID NO: 1790 - DNA, 84 bp, Artificial
  Barcode component
  misc_feature (33)..(34): n is a, c, g, or t
  misc_feature (43)..(44): n is a, c, g, or t
  misc_feature (53)..(54): n is a, c, g, or t
tttttttaagcagtggtatcaacgcagagtacnncgatctagnnttacggtgnntttttttttttttttttttttttttttttt

SEQ ID NO: 1791 - DNA, 84 bp, Artificial
  Barcode component
  misc_feature (33)..(34): n is a, c, g, or t
  misc_feature (43)..(44): n is a, c, g, or t
  misc_feature (53)..(54): n is a, c, g, or t
tttttttaagcagtggtatcaacgcagagtacnncgatctagnncatatcggnntttttttttttttttttttttttttttttt

SEQ ID NO: 1792 - DNA, 84 bp, Artificial
  Barcode component
  misc_feature (33)..(34): n is a, c, g, or t
  misc_feature (43)..(44): n is a, c, g, or t
  misc_feature (53)..(54): n is a, c, g, or t
tttttttaagcagtggtatcaacgcagagtacnncgatctagnncttcggtanntttttttttttttttttttttttttttttt

SEQ ID NO: 1793 - DNA, 84 bp, Artificial
  Barcode component
  misc_feature (33)..(34): n is a, c, g, or t
  misc_feature (43)..(44): n is a, c, g, or t
  misc_feature (53)..(54): n is a, c, g, or t
tttttttaagcagtggtatcaacgcagagtacnncgatctagnntcctaacgnntttttttttttttttttttttttttttttt

SEQ ID NO: 1794 - DNA, 84 bp, Artificial
  Barcode component
  misc_feature (33)..(34): n is a, c, g, or t
  misc_feature (43)..(44): n is a, c, g, or t
  misc_feature (53)..(54): n is a, c, g, or t
tttttttaagcagtggtatcaacgcagagtacnncgatctagnngtaagccanntttttttttttttttttttttttttttttt

SEQ ID NO: 1795 - DNA, 84 bp, Artificial
  Barcode component
  misc_feature (33)..(34): n is a, c, g, or t
  misc_feature (43)..(44): n is a, c, g, or t
  misc_feature (53)..(54): n is a, c, g, or t
tttttttaagcagtggtatcaacgcagagtacnncgatctagnntaaggtggnntttttttttttttttttttttttttttttt

SEQ ID NO: 1796 - DNA, 84 bp, Artificial
  Barcode component
  misc_feature (33)..(34): n is a, c, g, or t
  misc_feature (43)..(44): n is a, c, g, or t
  misc_feature (53)..(54): n is a, c, g, or t
tttttttaagcagtggtatcaacgcagagtacnncgatctagnnggtaagctnntttttttttttttttttttttttttttttt

SEQ ID NO: 1797 - DNA, 84 bp, Artificial
  Barcode component
  misc_feature (33)..(34): n is a, c, g, or t
  misc_feature (43)..(44): n is a, c, g, or t
  misc_feature (53)..(54): n is a, c, g, or t
tttttttaagcagtggtatcaacgcagagtacnncgatctagnntgtgtcganntttttttttttttttttttttttttttttt

SEQ ID NO: 1798 - DNA, 84 bp, Artificial
  Barcode component
  misc_feature (33)..(34): n is a, c, g, or t
  misc_feature (43)..(44): n is a, c, g, or t
  misc_feature (53)..(54): n is a, c, g, or t
tttttttaagcagtggtatcaacgcagagtacnncgatctagnngagcatganntttttttttttttttttttttttttttttt

SEQ ID NO: 1799 - DNA, 84 bp, Artificial
  Barcode component
  misc_feature (33)..(34): n is a, c, g, or t
  misc_feature (43)..(44): n is a, c, g, or t
  misc_feature (53)..(54): n is a, c, g, or t
tttttttaagcagtggtatcaacgcagagtacnncgatctagnntcgaagtcnntttttttttttttttttttttttttttttt

SEQ ID NO: 1800 - DNA, 84 bp, Artificial
  Barcode component
  misc_feature (33)..(34): n is a, c, g, or t
  misc_feature (43)..(44): n is a, c, g, or t
  misc_feature (53)..(54): n is a, c, g, or t
tttttttaagcagtggtatcaacgcagagtacnncgatctagnnggtgaacanntttttttttttttttttttttttttttttt

SEQ ID NO: 1801 - DNA, 84 bp, Artificial
  Barcode component
  misc_feature (33)..(34): n is a, c, g, or t
  misc_feature (43)..(44): n is a, c, g, or t
  misc_feature (53)..(54): n is a, c, g, or t
tttttttaagcagtggtatcaacgcagagtacnncgatctagnnacatgcacnntttttttttttttttttttttttttttttt

SEQ ID NO: 1802 - DNA, 84 bp, Artificial
  Barcode component
  misc_feature (33)..(34): n is a, c, g, or t
  misc_feature (43)..(44): n is a, c, g, or t
  misc_feature (53)..(54): n is a, c, g, or t
tttttttaagcagtggtatcaacgcagagtacnncgatctagnnccaacagtnntttttttttttttttttttttttttttttt

SEQ ID NO: 1803 - DNA, 84 bp, Artificial
  Barcode component
  misc_feature (33)..(34): n is a, c, g, or t
  misc_feature (43)..(44): n is a, c, g, or t
  misc_feature (53)..(54): n is a, c, g, or t
tttttttaagcagtggtatcaacgcagagtacnncgatctagnnagaacagcnntttttttttttttttttttttttttttttt

SEQ ID NO: 1804 - DNA, 84 bp, Artificial
  Barcode component
  misc_feature (33)..(34): n is a, c, g, or t
  misc_feature (43)..(44): n is a, c, g, or t
  misc_feature (53)..(54): n is a, c, g, or t
tttttttaagcagtggtatcaacgcagagtacnncgatctagnngaacacgtnntttttttttttttttttttttttttttttt

SEQ ID NO: 1805 - DNA, 84 bp, Artificial
  Barcode component
  misc_feature (33)..(34): n is a, c, g, or t
  misc_feature (43)..(44): n is a, c, g, or t
  misc_feature (53)..(54): n is a, c, g, or t
tttttttaagcagtggtatcaacgcagagtacnncgatctagnnggtcttcanntttttttttttttttttttttttttttttt

SEQ ID NO: 1806 - DNA, 84 bp, Artificial
  Barcode component
  misc_feature (33)..(34): n is a, c, g, or t
  misc_feature (43)..(44): n is a, c, g, or t
  misc_feature (53)..(54): n is a, c, g, or t
tttttttaagcagtggtatcaacgcagagtacnncgatctagnnaggttcagnntttttttttttttttttttttttttttttt

SEQ ID NO: 1807 - DNA, 84 bp, Artificial
  Barcode component
  misc_feature (33)..(34): n is a, c, g, or t
  misc_feature (43)..(44): n is a, c, g, or t
  misc_feature (53)..(54): n is a, c, g, or t
tttttttaagcagtggtatcaacgcagagtacnncgatctagnnctagagcanntttttttttttttttttttttttttttttt

SEQ ID NO: 1808 - DNA, 84 bp, Artificial
  Barcode component
  misc_feature (33)..(34): n is a, c, g, or t
  misc_feature (43)..(44): n is a, c, g, or t
  misc_feature (53)..(54): n is a, c, g, or t
tttttttaagcagtggtatcaacgcagagtacnncgatctagnncttctagcnntttttttttttttttttttttttttttttt

SEQ ID NO: 1809 - DNA, 84 bp, Artificial
  Barcode component
  misc_feature (33)..(34): n is a, c, g, or t
  misc_feature (43)..(44): n is a, c, g, or t
  misc_feature (53)..(54): n is a, c, g, or t
tttttttaagcagtggtatcaacgcagagtacnncgatctagnngagtaacgnntttttttttttttttttttttttttttttt

SEQ ID NO: 1810 - DNA, 84 bp, Artificial
  Barcode component
  misc_feature (33)..(34): n is a, c, g, or t
  misc_feature (43)..(44): n is a, c, g, or t
  misc_feature (53)..(54): n is a, c, g, or t
tttttttaagcagtggtatcaacgcagagtacnncgatctagnnctaagaggnntttttttttttttttttttttttttttttt

SEQ ID NO: 1811 - DNA, 84 bp, Artificial
  Barcode component
  misc_feature (33)..(34): n is a, c, g, or t
  misc_feature (43)..(44): n is a, c, g, or t
  misc_feature (53)..(54): n is a, c, g, or t
tttttttaagcagtggtatcaacgcagagtacnncgatctagnnacgtgtagnntttttttttttttttttttttttttttttt

SEQ ID NO: 1812 - DNA, 84 bp, Artificial
  Barcode component
  misc_feature (33)..(34): n is a, c, g, or t
  misc_feature (43)..(44): n is a, c, g, or t
  misc_feature (53)..(54): n is a, c, g, or t
tttttttaagcagtggtatcaacgcagagtacnncgatctagnnactacaggnntttttttttttttttttttttttttttttt

SEQ ID NO: 1813 - DNA, 84 bp, Artificial
  Barcode component
  misc_feature (33)..(34): n is a, c, g, or t
  misc_feature (43)..(44): n is a, c, g, or t
  misc_feature (53)..(54): n is a, c, g, or t
tttttttaagcagtggtatcaacgcagagtacnncgatctagnntacaggtcnntttttttttttttttttttttttttttttt

SEQ ID NO: 1814 - DNA, 84 bp, Artificial
  Barcode component
  misc_feature (33)..(34): n is a, c, g, or t
  misc_feature (43)..(44): n is a, c, g, or t
  misc_feature (53)..(54): n is a, c, g, or t
tttttttaagcagtggtatcaacgcagagtacnncgatctagnnctcacatgnntttttttttttttttttttttttttttttt

SEQ ID NO: 1815 - DNA, 84 bp, Artificial
  Barcode component
  misc_feature (33)..(34): n is a, c, g, or t
  misc_feature (43)..(44): n is a, c, g, or t
  misc_feature (53)..(54): n is a, c, g, or t
tttttttaagcagtggtatcaacgcagagtacnncgatctagnnactaggagnntttttttttttttttttttttttttttttt

SEQ ID NO: 1816 - DNA, 84 bp, Artificial
  Barcode component
  misc_feature (33)..(34): n is a, c, g, or t
  misc_feature (43)..(44): n is a, c, g, or t
  misc_feature (53)..(54): n is a, c, g, or t
tttttttaagcagtggtatcaacgcagagtacnncgatctagnnccatagganntttttttttttttttttttttttttttttt

SEQ ID NO: 1817 - DNA, 84 bp, Artificial
  Barcode component
  misc_feature (33)..(34): n is a, c, g, or t
  misc_feature (43)..(44): n is a, c, g, or t
  misc_feature (53)..(54): n is a, c, g, or t
tttttttaagcagtggtatcaacgcagagtacnncgatctagnnggagaatcnntttttttttttttttttttttttttttttt

SEQ ID NO: 1818 - DNA, 84 bp, Artificial
  Barcode component
  misc_feature (33)..(34): n is a, c, g, or t
  misc_feature (43)..(44): n is a, c, g, or t
  misc_feature (53)..(54): n is a, c, g, or t
tttttttaagcagtggtatcaacgcagagtacnncgatctagnngccaagaanntttttttttttttttttttttttttttttt

SEQ ID NO: 1819 - DNA, 84 bp, Artificial
  Barcode component
  misc_feature (33)..(34): n is a, c, g, or t
  misc_feature (43)..(44): n is a, c, g, or t
  misc_feature (53)..(54): n is a, c, g, or t
tttttttaagcagtggtatcaacgcagagtacnncgatctagnnaaggcaagnntttttttttttttttttttttttttttttt

SEQ ID NO: 1820 - DNA, 84 bp, Artificial
  Barcode component
  misc_feature (33)..(34): n is a, c, g, or t
  misc_feature (43)..(44): n is a, c, g, or t
  misc_feature (53)..(54): n is a, c, g, or t
tttttttaagcagtggtatcaacgcagagtacnncgatctagnnaatgtcgcnntttttttttttttttttttttttttttttt

SEQ ID NO: 1821 - DNA, 84 bp, Artificial
  Barcode component
  misc_feature (33)..(34): n is a, c, g, or t
  misc_feature (43)..(44): n is a, c, g, or t
  misc_feature (53)..(54): n is a, c, g, or t
tttttttaagcagtggtatcaacgcagagtacnncgatctagnnatggaaccnntttttttttttttttttttttttttttttt

SEQ ID NO: 1822 - DNA, 84 bp, Artificial
  Barcode component
  misc_feature (33)..(34): n is a, c, g, or t
  misc_feature (43)..(44): n is a, c, g, or t
  misc_feature (53)..(54): n is a, c, g, or t
tttttttaagcagtggtatcaacgcagagtacnncgatctagnnagaggcatnntttttttttttttttttttttttttttttt

SEQ ID NO: 1823 - DNA, 84 bp, Artificial
  Barcode component
  misc_feature (33)..(34): n is a, c, g, or t
  misc_feature (43)..(44): n is a, c, g, or t
  misc_feature (53)..(54): n is a, c, g, or t
tttttttaagcagtggtatcaacgcagagtacnncgatctagnntgcatagcnntttttttttttttttttttttttttttttt

SEQ ID NO: 1824 - DNA, 84 bp, Artificial
  Barcode component
  misc_feature (33)..(34): n is a, c, g, or t
  misc_feature (43)..(44): n is a, c, g, or t
  misc_feature (53)..(54): n is a, c, g, or t
tttttttaagcagtggtatcaacgcagagtacnncgatctagnnctaacgganntttttttttttttttttttttttttttttt

SEQ ID NO: 1825 - DNA, 84 bp, Artificial
  Barcode component
  misc_feature (33)..(34): n is a, c, g, or t
  misc_feature (43)..(44): n is a, c, g, or t
  misc_feature (53)..(54): n is a, c, g, or t
tttttttaagcagtggtatcaacgcagagtacnncgatctagnntatcgaggnntttttttttttttttttttttttttttttt

SEQ ID NO: 1826 - DNA, 84 bp, Artificial
  Barcode component
  misc_feature (33)..(34): n is a, c, g, or t
  misc_feature (43)..(44): n is a, c, g, or t
  misc_feature (53)..(54): n is a, c, g, or t
tttttttaagcagtggtatcaacgcagagtacnncgatctagnncatagcctnntttttttttttttttttttttttttttttt

SEQ ID NO: 1827 - DNA, 84 bp, Artificial
  Barcode component
  misc_feature (33)..(34): n is a, c, g, or t
  misc_feature (43)..(44): n is a, c, g, or t
  misc_feature (53)..(54): n is a, c, g, or t
tttttttaagcagtggtatcaacgcagagtacnncgatctagnnatcgagacnntttttttttttttttttttttttttttttt

SEQ ID NO: 1828 - DNA, 84 bp, Artificial
  Barcode component
  misc_feature (33)..(34): n is a, c, g, or t
  misc_feature (43)..(44): n is a, c, g, or t
  misc_feature (53)..(54): n is a, c, g, or t
tttttttaagcagtggtatcaacgcagagtacnncgatctagnnggaagagtnntttttttttttttttttttttttttttttt

SEQ ID NO: 1829 - DNA, 84 bp, Artificial
  Barcode component
  misc_feature (33)..(34): n is a, c, g, or t
  misc_feature (43)..(44): n is a, c, g, or t
  misc_feature (53)..(54): n is a, c, g, or t
tttttttaagcagtggtatcaacgcagagtacnncgatctagnnccaagtagnntttttttttttttttttttttttttttttt

SEQ ID NO: 1830 - DNA, 84 bp, Artificial
  Barcode component
  misc_feature (33)..(34): n is a, c, g, or t
  misc_feature (43)..(44): n is a, c, g, or t
  misc_feature (53)..(54): n is a, c, g, or t
tttttttaagcagtggtatcaacgcagagtacnncgatctagnnctgaacagnntttttttttttttttttttttttttttttt

SEQ ID NO: 1831 - DNA, 84 bp, Artificial
  Barcode component
  misc_feature (33)..(34): n is a, c, g, or t
  misc_feature (43)..(44): n is a, c, g, or t
  misc_feature (53)..(54): n is a, c, g, or t
tttttttaagcagtggtatcaacgcagagtacnncgatctagnngtaggttcnntttttttttttttttttttttttttttttt

SEQ ID NO: 1832 - DNA, 84 bp, Artificial
  Barcode component
  misc_feature (33)..(34): n is a, c, g, or t
  misc_feature (43)..(44): n is a, c, g, or t
  misc_feature (53)..(54): n is a, c, g, or t
tttttttaagcagtggtatcaacgcagagtacnncgatctagnngtatggacnntttttttttttttttttttttttttttttt

SEQ ID NO: 1833 - DNA, 84 bp, Artificial
  Barcode component
  misc_feature (33)..(34): n is a, c, g, or t
  misc_feature (43)..(44): n is a, c, g, or t
  misc_feature (53)..(54): n is a, c, g, or t
tttttttaagcagtggtatcaacgcagagtacnncgatctagnntcgcaacanntttttttttttttttttttttttttttttt

SEQ ID NO: 1834 - DNA, 84 bp, Artificial
  Barcode component
  misc_feature (33)..(34): n is a, c, g, or t
  misc_feature (43)..(44): n is a, c, g, or t
  misc_feature (53)..(54): n is a, c, g, or t
tttttttaagcagtggtatcaacgcagagtacnncgatctagnnccgctaatnntttttttttttttttttttttttttttttt

SEQ ID NO: 1835 - DNA, 84 bp, Artificial
  Barcode component
  misc_feature (33)..(34): n is a, c, g, or t
  misc_feature (43)..(44): n is a, c, g, or t
  misc_feature (53)..(54): n is a, c, g, or t
tttttttaagcagtggtatcaacgcagagtacnncgatctagnngattcgcanntttttttttttttttttttttttttttttt

SEQ ID NO: 1836 - DNA, 84 bp, Artificial
  Barcode component
  misc_feature (33)..(34): n is a, c, g, or t
  misc_feature (43)..(44): n is a, c, g, or t
  misc_feature (53)..(54): n is a, c, g, or t
tttttttaagcagtggtatcaacgcagagtacnncgatctagnncgatggaanntttttttttttttttttttttttttttttt

SEQ ID NO: 1837 - DNA, 84 bp, Artificial
  Barcode component
  misc_feature (33)..(34): n is a, c, g, or t
  misc_feature (43)..(44): n is a, c, g, or t
  misc_feature (53)..(54): n is a, c, g, or t
tttttttaagcagtggtatcaacgcagagtacnncgatctagnnagcaagganntttttttttttttttttttttttttttttt

SEQ ID NO: 1838 - DNA, 84 bp, Artificial
  Barcode component
  misc_feature (33)..(34): n is a, c, g, or t
  misc_feature (43)..(44): n is a, c, g, or t
  misc_feature (53)..(54): n is a, c, g, or t
tttttttaagcagtggtatcaacgcagagtacnncgatctagnncgtagcaanntttttttttttttttttttttttttttttt

SEQ ID NO: 1839 - DNA, 84 bp, Artificial
  Barcode component
  misc_feature (33)..(34): n is a, c, g, or t
  misc_feature (43)..(44): n is a, c, g, or t
  misc_feature (53)..(54): n is a, c, g, or t
tttttttaagcagtggtatcaacgcagagtacnncgatctagnntggcagtanntttttttttttttttttttttttttttttt

SEQ ID NO: 1840 - DNA, 84 bp, Artificial
  Barcode component
  misc_feature (33)..(34): n is a, c, g, or t
  misc_feature (43)..(44): n is a, c, g, or t
  misc_feature (53)..(54): n is a, c, g, or t
tttttttaagcagtggtatcaacgcagagtacnncgatctagnncggtagttnntttttttttttttttttttttttttttttt

SEQ ID NO: 1841 - DNA, 84 bp, Artificial
  Barcode component
  misc_feature (33)..(34): n is a, c, g, or t
  misc_feature (43)..(44): n is a, c, g, or t
  misc_feature (53)..(54): n is a, c, g, or t
tttttttaagcagtggtatcaacgcagagtacnncgatctagnntgacttcgnntttttttttttttttttttttttttttttt

SEQ ID NO: 1842 - DNA, 84 bp, Artificial
  Barcode component
  misc_feature (33)..(34): n is a, c, g, or t
  misc_feature (43)..(44): n is a, c, g, or t
  misc_feature (53)..(54): n is a, c, g, or t
tttttttaagcagtggtatcaacgcagagtacnncgatctagnngagtgcaanntttttttttttttttttttttttttttttt

SEQ ID NO: 1843 - DNA, 84 bp, Artificial
  Barcode component
  misc_feature (33)..(34): n is a, c, g, or t
  misc_feature (43)..(44): n is a, c, g, or t
  misc_feature (53)..(54): n is a, c, g, or t
tttttttaagcagtggtatcaacgcagagtacnncgatctagnnacggtaacnntttttttttttttttttttttttttttttt

SEQ ID NO: 1844 - DNA, 84 bp, Artificial
  Barcode component
  misc_feature (33)..(34): n is a, c, g, or t
  misc_feature (43)..(44): n is a, c, g, or t
  misc_feature (53)..(54): n is a, c, g, or t
tttttttaagcagtggtatcaacgcagagtacnncgatctagnnaagtggtgnntttttttttttttttttttttttttttttt

SEQ ID NO: 1845 - DNA, 84 bp, Artificial
  Barcode component
  misc_feature (33)..(34): n is a, c, g, or t
  misc_feature (43)..(44): n is a, c, g, or t
  misc_feature (53)..(54): n is a, c, g, or t
tttttttaagcagtggtatcaacgcagagtacnncgatctagnnggagacaanntttttttttttttttttttttttttttttt

SEQ ID NO: 1846 - DNA, 84 bp, Artificial
  Barcode component
  misc_feature (33)..(34): n is a, c, g, or t
  misc_feature (43)..(44): n is a, c, g, or t
  misc_feature (53)..(54): n is a, c, g, or t
tttttttaagcagtggtatcaacgcagagtacnncgatctagnntcaaggacnntttttttttttttttttttttttttttttt

SEQ ID NO: 1847 - DNA, 84 bp, Artificial
  Barcode component
  misc_feature (33)..(34): n is a, c, g, or t
  misc_feature (43)..(44): n is a, c, g, or t
  misc_feature (53)..(54): n is a, c, g, or t
tttttttaagcagtggtatcaacgcagagtacnncgatctagnnaagagagcnntttttttttttttttttttttttttttttt

SEQ ID NO: 1848 - DNA, 84 bp, Artificial
  Barcode component
  misc_feature (33)..(34): n is a, c, g, or t
  misc_feature (43)..(44): n is a, c, g, or t
  misc_feature (53)..(54): n is a, c, g, or t
tttttttaagcagtggtatcaacgcagagtacnncgatctagnncgagagatnntttttttttttttttttttttttttttttt

SEQ ID NO: 1849 - DNA, 84 bp, Artificial
  Barcode component
  misc_feature (33)..(34): n is a, c, g, or t
  misc_feature (43)..(44): n is a, c, g, or t
  misc_feature (53)..(54): n is a, c, g, or t
tttttttaagcagtggtatcaacgcagagtacnncgatctagnnacagatggnntttttttttttttttttttttttttttttt

SEQ ID NO: 1850 - DNA, 84 bp, Artificial
  Barcode component
  misc_feature (33)..(34): n is a, c, g, or t
  misc_feature (43)..(44): n is a, c, g, or t
  misc_feature (53)..(54): n is a, c, g, or t
tttttttaagcagtggtatcaacgcagagtacnncgatctagnnaggagtcanntttttttttttttttttttttttttttttt

SEQ ID NO: 1851 - DNA, 84 bp, Artificial
  Barcode component
  misc_feature (33)..(34): n is a, c, g, or t
  misc_feature (43)..(44): n is a, c, g, or t
  misc_feature (53)..(54): n is a, c, g, or t
tttttttaagcagtggtatcaacgcagagtacnncgatctagnncgtgttacnntttttttttttttttttttttttttttttt

SEQ ID NO: 1852 - DNA, 84 bp, Artificial
  Barcode component
  misc_feature (33)..(34): n is a, c, g, or t
  misc_feature (43)..(44): n is a, c, g, or t
  misc_feature (53)..(54): n is a, c, g, or t
tttttttaagcagtggtatcaacgcagagtacnncgatctagnntagtgtgcnntttttttttttttttttttttttttttttt

SEQ ID NO: 1853 - DNA, 84 bp, Artificial
  Barcode component
  misc_feature (33)..(34): n is a, c, g, or t
  misc_feature (43)..(44): n is a, c, g, or t
  misc_feature (53)..(54): n is a, c, g, or t
tttttttaagcagtggtatcaacgcagagtacnncgatctagnnctcatgacnntttttttttttttttttttttttttttttt

SEQ ID NO: 1854 - DNA, 84 bp, Artificial
  Barcode component
  misc_feature (33)..(34): n is a, c, g, or t
  misc_feature (43)..(44): n is a, c, g, or t
  misc_feature (53)..(54): n is a, c, g, or t
tttttttaagcagtggtatcaacgcagagtacnncgatctagnngtatccagnntttttttttttttttttttttttttttttt

SEQ ID NO: 1855 - DNA, 84 bp, Artificial
  Barcode component
  misc_feature (33)..(34): n is a, c, g, or t
  misc_feature (43)..(44): n is a, c, g, or t
  misc_feature (53)..(54): n is a, c, g, or t
tttttttaagcagtggtatcaacgcagagtacnncgatctagnnacgcctatnntttttttttttttttttttttttttttttt

SEQ ID NO: 1856 - DNA, 84 bp, Artificial
  Barcode component
  misc_feature (33)..(34): n is a, c, g, or t
  misc_feature (43)..(44): n is a, c, g, or t
  misc_feature (53)..(54): n is a, c, g, or t
tttttttaagcagtggtatcaacgcagagtacnncgatctagnnaacgacctnntttttttttttttttttttttttttttttt

SEQ ID NO: 1857 - DNA, 84 bp, Artificial
  Barcode component
  misc_feature (33)..(34): n is a, c, g, or t
  misc_feature (43)..(44): n is a, c, g, or t
  misc_feature (53)..(54): n is a, c, g, or t
tttttttaagcagtggtatcaacgcagagtacnncgatctagnnatcaggctnntttttttttttttttttttttttttttttt

SEQ ID NO: 1858 - DNA, 84 bp, Artificial
  Barcode component
  misc_feature (33)..(34): n is a, c, g, or t
  misc_feature (43)..(44): n is a, c, g, or t
  misc_feature (53)..(54): n is a, c, g, or t
tttttttaagcagtggtatcaacgcagagtacnncgatctagnncaagttcgnntttttttttttttttttttttttttttttt

SEQ ID NO: 1859 - DNA, 84 bp, Artificial
  Barcode component
  misc_feature (33)..(34): n is a, c, g, or t
  misc_feature (43)..(44): n is a, c, g, or t
  misc_feature (53)..(54): n is a, c, g, or t
tttttttaagcagtggtatcaacgcagagtacnncgatctagnntagccaganntttttttttttttttttttttttttttttt

SEQ ID NO: 1860 - DNA, 84 bp, Artificial
  Barcode component
  misc_feature (33)..(34): n is a, c, g, or t
  misc_feature (43)..(44): n is a, c, g, or t
  misc_feature (53)..(54): n is a, c, g, or t
tttttttaagcagtggtatcaacgcagagtacnncgatctagnncaatcacgnntttttttttttttttttttttttttttttt

SEQ ID NO: 1861 - DNA, 84 bp, Artificial
  Barcode component
  misc_feature (33)..(34): n is a, c, g, or t
  misc_feature (43)..(44): n is a, c, g, or t
  misc_feature (53)..(54): n is a, c, g, or t
tttttttaagcagtggtatcaacgcagagtacnncgatctagnngcaacaagnntttttttttttttttttttttttttttttt

SEQ ID NO: 1862 - DNA, 84 bp, Artificial
  Barcode component
  misc_feature (33)..(34): n is a, c, g, or t
  misc_feature (43)..(44): n is a, c, g, or t
  misc_feature (53)..(54): n is a, c, g, or t
tttttttaagcagtggtatcaacgcagagtacnncgatctagnncacgacaanntttttttttttttttttttttttttttttt

SEQ ID NO: 1863 - DNA, 84 bp, Artificial
  Barcode component
  misc_feature (33)..(34): n is a, c, g, or t
  misc_feature (43)..(44): n is a, c, g, or t
  misc_feature (53)..(54): n is a, c, g, or t
tttttttaagcagtggtatcaacgcagagtacnncgatctagnntacggaganntttttttttttttttttttttttttttttt

SEQ ID NO: 1864 - DNA, 84 bp, Artificial
  Barcode component
  misc_feature (33)..(34): n is a, c, g, or t
  misc_feature (43)..(44): n is a, c, g, or t
  misc_feature (53)..(54): n is a, c, g, or t
tttttttaagcagtggtatcaacgcagagtacnncgatctagnncgacaaganntttttttttttttttttttttttttttttt

SEQ ID NO: 1865 - DNA, 84 bp, Artificial
  Barcode component
  misc_feature (33)..(34): n is a, c, g, or t
  misc_feature (43)..(44): n is a, c, g, or t
  misc_feature (53)..(54): n is a, c, g, or t
tttttttaagcagtggtatcaacgcagagtacnncgatctagnncgaagtganntttttttttttttttttttttttttttttt

SEQ ID NO: 1866 - DNA, 84 bp, Artificial
  Barcode component
  misc_feature (33)..(34): n is a, c, g, or t
  misc_feature (43)..(44): n is a, c, g, or t
  misc_feature (53)..(54): n is a, c, g, or t
tttttttaagcagtggtatcaacgcagagtacnncgatctagnnagctggtanntttttttttttttttttttttttttttttt

SEQ ID NO: 1867 - DNA, 84 bp, Artificial
  Barcode component
  misc_feature (33)..(34): n is a, c, g, or t
  misc_feature (43)..(44): n is a, c, g, or t
  misc_feature (53)..(54): n is a, c, g, or t
tttttttaagcagtggtatcaacgcagagtacnncgatctagnnaactaggcnntttttttttttttttttttttttttttttt

SEQ ID NO: 1868 - DNA, 84 bp, Artificial
  Barcode component
  misc_feature (33)..(34): n is a, c, g, or t
  misc_feature (43)..(44): n is a, c, g, or t
  misc_feature (53)..(54): n is a, c, g, or t
tttttttaagcagtggtatcaacgcagagtacnncgatctagnncagcaagtnntttttttttttttttttttttttttttttt

SEQ ID NO: 1869 - DNA, 84 bp, Artificial
  Barcode component
  misc_feature (33)..(34): n is a, c, g, or t
  misc_feature (43)..(44): n is a, c, g, or t
  misc_feature (53)..(54): n is a, c, g, or t
tttttttaagcagtggtatcaacgcagagtacnncgatctagnnacgaggtanntttttttttttttttttttttttttttttt

SEQ ID NO: 1870 - DNA, 84 bp, Artificial
  Barcode component
  misc_feature (33)..(34): n is a, c, g, or t
  misc_feature (43)..(44): n is a, c, g, or t
  misc_feature (53)..(54): n is a, c, g, or t
tttttttaagcagtggtatcaacgcagagtacnncgatctagnncatcttccnntttttttttttttttttttttttttttttt

SEQ ID NO: 1871 - DNA, 84 bp, Artificial
  Barcode component
  misc_feature (33)..(34): n is a, c, g, or t
  misc_feature (43)..(44): n is a, c, g, or t
  misc_feature (53)..(54): n is a, c, g, or t
tttttttaagcagtggtatcaacgcagagtacnncgatctagnncctgaatcnntttttttttttttttttttttttttttttt

SEQ ID NO: 1872 - DNA, 84 bp, Artificial
  Barcode component
  misc_feature (33)..(34): n is a, c, g, or t
  misc_feature (43)..(44): n is a, c, g, or t
  misc_feature (53)..(54): n is a, c, g, or t
tttttttaagcagtggtatcaacgcagagtacnncgatctagnntgcagactnntttttttttttttttttttttttttttttt

SEQ ID NO: 1873 - DNA, 84 bp, Artificial
  Barcode component
  misc_feature (33)..(34): n is a, c, g, or t
  misc_feature (43)..(44): n is a, c, g, or t
  misc_feature (53)..(54): n is a, c, g, or t
tttttttaagcagtggtatcaacgcagagtacnncgatctagnnagatgtggnntttttttttttttttttttttttttttttt

SEQ ID NO: 1874 - DNA, 84 bp, Artificial
  Barcode component
  misc_feature (33)..(34): n is a, c, g, or t
  misc_feature (43)..(44): n is a, c, g, or t
  misc_feature (53)..(54): n is a, c, g, or t
tttttttaagcagtggtatcaacgcagagtacnncgatctagnnagttcgacnntttttttttttttttttttttttttttttt

SEQ ID NO: 1875 - DNA, 84 bp, Artificial
  Barcode component
  misc_feature (33)..(34): n is a, c, g, or t
  misc_feature (43)..(44): n is a, c, g, or t
  misc_feature (53)..(54): n is a, c, g, or t
tttttttaagcagtggtatcaacgcagagtacnncgatctagnnacaacctcnntttttttttttttttttttttttttttttt

SEQ ID NO: 1876 - DNA, 84 bp, Artificial
  Barcode component
  misc_feature (33)..(34): n is a, c, g, or t
  misc_feature (43)..(44): n is a, c, g, or t
  misc_feature (53)..(54): n is a, c, g, or t
tttttttaagcagtggtatcaacgcagagtacnncgatctagnncatggtagnntttttttttttttttttttttttttttttt

SEQ ID NO: 1877 - DNA, 84 bp, Artificial
  Barcode component
  misc_feature (33)..(34): n is a, c, g, or t
  misc_feature (43)..(44): n is a, c, g, or t
  misc_feature (53)..(54): n is a, c, g, or t
tttttttaagcagtggtatcaacgcagagtacnncgatctagnncgtatctcnntttttttttttttttttttttttttttttt

SEQ ID NO: 1878 - DNA, 84 bp, Artificial
  Barcode component
  misc_feature (33)..(34): n is a, c, g, or t
  misc_feature (43)..(44): n is a, c, g, or t
  misc_feature (53)..(54): n is a, c, g, or t
tttttttaagcagtggtatcaacgcagagtacnncgatctagnncctagttcnntttttttttttttttttttttttttttttt

SEQ ID NO: 1879 - DNA, 84 bp, Artificial
  Barcode component
  misc_feature (33)..(34): n is a, c, g, or t
  misc_feature (43)..(44): n is a, c, g, or t
  misc_feature (53)..(54): n is a, c, g, or t
tttttttaagcagtggtatcaacgcagagtacnncgatctagnncaagagtcnntttttttttttttttttttttttttttttt

SEQ ID NO: 1880 - DNA, 84 bp, Artificial
  Barcode component
  misc_feature (33)..(34): n is a, c, g, or t
  misc_feature (43)..(44): n is a, c, g, or t
  misc_feature (53)..(54): n is a, c, g, or t
tttttttaagcagtggtatcaacgcagagtacnngtgtatggnnaatcggcanntttttttttttttttttttttttttttttt

SEQ ID NO: 1881 - DNA, 84 bp, Artificial
  Barcode component
  misc_feature (33)..(34): n is a, c, g, or t
  misc_feature (43)..(44): n is a, c, g, or t
  misc_feature (53)..(54): n is a, c, g, or t
tttttttaagcagtggtatcaacgcagagtacnngtgtatggnntacggcatnntttttttttttttttttttttttttttttt

SEQ ID NO: 1882 - DNA, 84 bp, Artificial
  Barcode component
  misc_feature (33)..(34): n is a, c, g, or t
  misc_feature (43)..(44): n is a, c, g, or t
  misc_feature (53)..(54): n is a, c, g, or t
tttttttaagcagtggtatcaacgcagagtacnngtgtatggnnttggatcgnntttttttttttttttttttttttttttttt

SEQ ID NO: 1883 - DNA, 84 bp, Artificial
  Barcode component
  misc_feature (33)..(34): n is a, c, g, or t
  misc_feature (43)..(44): n is a, c, g, or t
  misc_feature (53)..(54): n is a, c, g, or t
tttttttaagcagtggtatcaacgcagagtacnngtgtatggnntggaacganntttttttttttttttttttttttttttttt

SEQ ID NO: 1884 - DNA, 84 bp, Artificial
  Barcode component
  misc_feature (33)..(34): n is a, c, g, or t
  misc_feature (43)..(44): n is a, c, g, or t
  misc_feature (53)..(54): n is a, c, g, or t
tttttttaagcagtggtatcaacgcagagtacnngtgtatggnnggcaatcanntttttttttttttttttttttttttttttt

SEQ ID NO: 1885 - DNA, 84 bp, Artificial
  Barcode component
  misc_feature (33)..(34): n is a, c, g, or t
  misc_feature (43)..(44): n is a, c, g, or t
  misc_feature (53)..(54): n is a, c, g, or t
tttttttaagcagtggtatcaacgcagagtacnngtgtatggnngaatccganntttttttttttttttttttttttttttttt

SEQ ID NO: 1886 - DNA, 84 bp, Artificial
  Barcode component
  misc_feature (33)..(34): n is a, c, g, or t
  misc_feature (43)..(44): n is a, c, g, or t
  misc_feature (53)..(54): n is a, c, g, or t
tttttttaagcagtggtatcaacgcagagtacnngtgtatggnnttacggtgnntttttttttttttttttttttttttttttt

SEQ ID NO: 1887 - DNA, 84 bp, Artificial
  Barcode component
  misc_feature (33)..(34): n is a, c, g, or t
  misc_feature (43)..(44): n is a, c, g, or t
  misc_feature (53)..(54): n is a, c, g, or t
tttttttaagcagtggtatcaacgcagagtacnngtgtatggnncatatcggnntttttttttttttttttttttttttttttt

SEQ ID NO: 1888 - DNA, 84 bp, Artificial
  Barcode component
  misc_feature (33)..(34): n is a, c, g, or t
  misc_feature (43)..(44): n is a, c, g, or t
  misc_feature (53)..(54): n is a, c, g, or t
tttttttaagcagtggtatcaacgcagagtacnngtgtatggnncttcggtanntttttttttttttttttttttttttttttt

SEQ ID NO: 1889 - DNA, 84 bp, Artificial
  Barcode component
  misc_feature (33)..(34): n is a, c, g, or t
  misc_feature (43)..(44): n is a, c, g, or t
  misc_feature (53)..(54): n is a, c, g, or t
tttttttaagcagtggtatcaacgcagagtacnngtgtatggnntcctaacgnntttttttttttttttttttttttttttttt

SEQ ID NO: 1890 - DNA, 84 bp, Artificial
  Barcode component
  misc_feature (33)..(34): n is a, c, g, or t
  misc_feature (43)..(44): n is a, c, g, or t
  misc_feature (53)..(54): n is a, c, g, or t
tttttttaagcagtggtatcaacgcagagtacnngtgtatggnngtaagccanntttttttttttttttttttttttttttttt

SEQ ID NO: 1891 - DNA, 84 bp, Artificial
  Barcode component
  misc_feature (33)..(34): n is a, c, g, or t
  misc_feature (43)..(44): n is a, c, g, or t
  misc_feature (53)..(54): n is a, c, g, or t
tttttttaagcagtggtatcaacgcagagtacnngtgtatggnntaaggtggnntttttttttttttttttttttttttttttt

SEQ ID NO: 1892 - DNA, 84 bp, Artificial
  Barcode component
  misc_feature (33)..(34): n is a, c, g, or t
  misc_feature (43)..(44): n is a, c, g, or t
  misc_feature (53)..(54): n is a, c, g, or t
tttttttaagcagtggtatcaacgcagagtacnngtgtatggnnggtaagctnntttttttttttttttttttttttttttttt

SEQ ID NO: 1893 - DNA, 84 bp, Artificial
  Barcode component
  misc_feature (33)..(34): n is a, c, g, or t
  misc_feature (43)..(44): n is a, c, g, or t
  misc_feature (53)..(54): n is a, c, g, or t
tttttttaagcagtggtatcaacgcagagtacnngtgtatggnntgtgtcganntttttttttttttttttttttttttttttt

SEQ ID NO: 1894 - DNA, 84 bp, Artificial
  Barcode component
  misc_feature (33)..(34): n is a, c, g, or t
  misc_feature (43)..(44): n is a, c, g, or t
  misc_feature (53)..(54): n is a, c, g, or t
tttttttaagcagtggtatcaacgcagagtacnngtgtatggnngagcatganntttttttttttttttttttttttttttttt

SEQ ID NO: 1895 - DNA, 84 bp, Artificial
  Barcode component
  misc_feature (33)..(34): n is a, c, g, or t
  misc_feature (43)..(44): n is a, c, g, or t
  misc_feature (53)..(54): n is a, c, g, or t
tttttttaagcagtggtatcaacgcagagtacnngtgtatggnntcgaagtcnntttttttttttttttttttttttttttttt

SEQ ID NO: 1896 - DNA, 84 bp, Artificial
  Barcode component
  misc_feature (33)..(34): n is a, c, g, or t
  misc_feature (43)..(44): n is a, c, g, or t
  misc_feature (53)..(54): n is a, c, g, or t
tttttttaagcagtggtatcaacgcagagtacnngtgtatggnnggtgaacanntttttttttttttttttttttttttttttt

SEQ ID NO: 1897 - DNA, 84 bp, Artificial
  Barcode component
  misc_feature (33)..(34): n is a, c, g, or t
  misc_feature (43)..(44): n is a, c, g, or t
  misc_feature (53)..(54): n is a, c, g, or t
tttttttaagcagtggtatcaacgcagagtacnngtgtatggnnacatgcacnntttttttttttttttttttttttttttttt

SEQ ID NO: 1898 - DNA, 84 bp, Artificial
  Barcode component
  misc_feature (33)..(34): n is a, c, g, or t
  misc_feature (43)..(44): n is a, c, g, or t
  misc_feature (53)..(54): n is a, c, g, or t
tttttttaagcagtggtatcaacgcagagtacnngtgtatggnnccaacagtnntttttttttttttttttttttttttttttt

SEQ ID NO: 1899 - DNA, 84 bp, Artificial
  Barcode component
  misc_feature (33)..(34): n is a, c, g, or t
  misc_feature (43)..(44): n is a, c, g, or t
  misc_feature (53)..(54): n is a, c, g, or t
tttttttaagcagtggtatcaacgcagagtacnngtgtatggnnagaacagcnntttttttttttttttttttttttttttttt

SEQ ID NO: 1900 - DNA, 84 bp, Artificial
  Barcode component
  misc_feature (33)..(34): n is a, c, g, or t
  misc_feature (43)..(44): n is a, c, g, or t
  misc_feature (53)..(54): n is a, c, g, or t
tttttttaagcagtggtatcaacgcagagtacnngtgtatggnngaacacgtnntttttttttttttttttttttttttttttt

SEQ ID NO: 1901 - DNA, 84 bp, Artificial
  Barcode component
  misc_feature (33)..(34): n is a, c, g, or t
  misc_feature (43)..(44): n is a, c, g, or t
  misc_feature (53)..(54): n is a, c, g, or t
tttttttaagcagtggtatcaacgcagagtacnngtgtatggnnggtcttcanntttttttttttttttttttttttttttttt

SEQ ID NO: 1902 - DNA, 84 bp, Artificial
  Barcode component
  misc_feature (33)..(34): n is a, c, g, or t
  misc_feature (43)..(44): n is a, c, g, or t
  misc_feature (53)..(54): n is a, c, g, or t
tttttttaagcagtggtatcaacgcagagtacnngtgtatggnnaggttcagnntttttttttttttttttttttttttttttt

SEQ ID NO: 1903 - DNA, 84 bp, Artificial
  Barcode component
  misc_feature (33)..(34): n is a, c, g, or t
  misc_feature (43)..(44): n is a, c, g, or t
  misc_feature (53)..(54): n is a, c, g, or t
tttttttaagcagtggtatcaacgcagagtacnngtgtatggnnctagagcanntttttttttttttttttttttttttttttt

SEQ ID NO: 1904 - DNA, 84 bp, Artificial
  Barcode component
  misc_feature (33)..(34): n is a, c, g, or t
  misc_feature (43)..(44): n is a, c, g, or t
  misc_feature (53)..(54): n is a, c, g, or t
tttttttaagcagtggtatcaacgcagagtacnngtgtatggnncttctagcnntttttttttttttttttttttttttttttt

SEQ ID NO: 1905 - DNA, 84 bp, Artificial
  Barcode component
  misc_feature (33)..(34): n is a, c, g, or t
  misc_feature (43)..(44): n is a, c, g, or t
  misc_feature (53)..(54): n is a, c, g, or t
tttttttaagcagtggtatcaacgcagagtacnngtgtatggnngagtaacgnntttttttttttttttttttttttttttttt

SEQ ID NO: 1906 - DNA, 84 bp, Artificial
  Barcode component
  misc_feature (33)..(34): n is a, c, g, or t
  misc_feature (43)..(44): n is a, c, g, or t
  misc_feature (53)..(54): n is a, c, g, or t
tttttttaagcagtggtatcaacgcagagtacnngtgtatggnnctaagaggnntttttttttttttttttttttttttttttt

SEQ ID NO: 1907 - DNA, 84 bp, Artificial
  Barcode component
  misc_feature (33)..(34): n is a, c, g, or t
  misc_feature (43)..(44): n is a, c, g, or t
  misc_feature (53)..(54): n is a, c, g, or t
tttttttaagcagtggtatcaacgcagagtacnngtgtatggnnacgtgtagnntttttttttttttttttttttttttttttt

SEQ ID NO: 1908 - DNA, 84 bp, Artificial
  Barcode component
  misc_feature (33)..(34): n is a, c, g, or t
  misc_feature (43)..(44): n is a, c, g, or t
  misc_feature (53)..(54): n is a, c, g, or t
tttttttaagcagtggtatcaacgcagagtacnngtgtatggnnactacaggnntttttttttttttttttttttttttttttt

SEQ ID NO: 1909 - DNA, 84 bp, Artificial
  Barcode component
  misc_feature (33)..(34): n is a, c, g, or t
  misc_feature (43)..(44): n is a, c, g, or t
  misc_feature (53)..(54): n is a, c, g, or t
tttttttaagcagtggtatcaacgcagagtacnngtgtatggnntacaggtcnntttttttttttttttttttttttttttttt

SEQ ID NO: 1910 - DNA, 84 bp, Artificial
  Barcode component
  misc_feature (33)..(34): n is a, c, g, or t
  misc_feature (43)..(44): n is a, c, g, or t
  misc_feature (53)..(54): n is a, c, g, or t
tttttttaagcagtggtatcaacgcagagtacnngtgtatggnnctcacatgnntttttttttttttttttttttttttttttt

SEQ ID NO: 1911 - DNA, 84 bp, Artificial
  Barcode component
  misc_feature (33)..(34): n is a, c, g, or t
  misc_feature (43)..(44): n is a, c, g, or t
  misc_feature (53)..(54): n is a, c, g, or t
tttttttaagcagtggtatcaacgcagagtacnngtgtatggnnactaggagnntttttttttttttttttttttttttttttt

SEQ ID NO: 1912 - DNA, 84 bp, Artificial
  Barcode component
  misc_feature (33)..(34): n is a, c, g, or t
  misc_feature (43)..(44): n is a, c, g, or t
  misc_feature (53)..(54): n is a, c, g, or t
tttttttaagcagtggtatcaacgcagagtacnngtgtatggnnccatagganntttttttttttttttttttttttttttttt

SEQ ID NO: 1913 - DNA, 84 bp, Artificial
  Barcode component
  misc_feature (33)..(34): n is a, c, g, or t
  misc_feature (43)..(44): n is a, c, g, or t
  misc_feature (53)..(54): n is a, c, g, or t
tttttttaagcagtggtatcaacgcagagtacnngtgtatggnnggagaatcnntttttttttttttttttttttttttttttt

SEQ ID NO: 1914 - DNA, 84 bp, Artificial
  Barcode component
  misc_feature (33)..(34): n is a, c, g, or t
  misc_feature (43)..(44): n is a, c, g, or t
  misc_feature (53)..(54): n is a, c, g, or t
tttttttaagcagtggtatcaacgcagagtacnngtgtatggnngccaagaanntttttttttttttttttttttttttttttt

SEQ ID NO: 1915 - DNA, 84 bp, Artificial
  Barcode component
  misc_feature (33)..(34): n is a, c, g, or t
  misc_feature (43)..(44): n is a, c, g, or t
  misc_feature (53)..(54): n is a, c, g, or t
tttttttaagcagtggtatcaacgcagagtacnngtgtatggnnaaggcaagnntttttttttttttttttttttttttttttt

SEQ ID NO: 1916 - DNA, 84 bp, Artificial
  Barcode component
  misc_feature (33)..(34): n is a, c, g, or t
  misc_feature (43)..(44): n is a, c, g, or t
  misc_feature (53)..(54): n is a, c, g, or t
tttttttaagcagtggtatcaacgcagagtacnngtgtatggnnaatgtcgcnntttttttttttttttttttttttttttttt

SEQ ID NO: 1917 - DNA, 84 bp, Artificial
  Barcode component
  misc_feature (33)..(34): n is a, c, g, or t
  misc_feature (43)..(44): n is a, c, g, or t
  misc_feature (53)..(54): n is a, c, g, or t
tttttttaagcagtggtatcaacgcagagtacnngtgtatggnnatggaaccnntttttttttttttttttttttttttttttt

SEQ ID NO: 1918 - DNA, 84 bp, Artificial
  Barcode component
  misc_feature (33)..(34): n is a, c, g, or t
  misc_feature (43)..(44): n is a, c, g, or t
  misc_feature (53)..(54): n is a, c, g, or t
tttttttaagcagtggtatcaacgcagagtacnngtgtatggnnagaggcatnntttttttttttttttttttttttttttttt

SEQ ID NO: 1919 - DNA, 84 bp, Artificial
  Barcode component
  misc_feature (33)..(34): n is a, c, g, or t
  misc_feature (43)..(44): n is a, c, g, or t
  misc_feature (53)..(54): n is a, c, g, or t
tttttttaagcagtggtatcaacgcagagtacnngtgtatggnntgcatagcnntttttttttttttttttttttttttttttt

SEQ ID NO: 1920 - DNA, 84 bp, Artificial
  Barcode component
  misc_feature (33)..(34): n is a, c, g, or t
  misc_feature (43)..(44): n is a, c, g, or t
  misc_feature (53)..(54): n is a, c, g, or t
tttttttaagcagtggtatcaacgcagagtacnngtgtatggnnctaacgganntttttttttttttttttttttttttttttt

SEQ ID NO: 1921 - DNA, 84 bp, Artificial
  Barcode component
  misc_feature (33)..(34): n is a, c, g, or t
  misc_feature (43)..(44): n is a, c, g, or t
  misc_feature (53)..(54): n is a, c, g, or t
tttttttaagcagtggtatcaacgcagagtacnngtgtatggnntatcgaggnntttttttttttttttttttttttttttttt

SEQ ID NO: 1922 - DNA, 84 bp, Artificial
  Barcode component
  misc_feature (33)..(34): n is a, c, g, or t
  misc_feature (43)..(44): n is a, c, g, or t
  misc_feature (53)..(54): n is a, c, g, or t
tttttttaagcagtggtatcaacgcagagtacnngtgtatggnncatagcctnntttttttttttttttttttttttttttttt

SEQ ID NO: 1923 - DNA, 84 bp, Artificial
  Barcode component
  misc_feature (33)..(34): n is a, c, g, or t
  misc_feature (43)..(44): n is a, c, g, or t
  misc_feature (53)..(54): n is a, c, g, or t
tttttttaagcagtggtatcaacgcagagtacnngtgtatggnnatcgagacnntttttttttttttttttttttttttttttt

SEQ ID NO: 1924 - DNA, 84 bp, Artificial
  Barcode component
  misc_feature (33)..(34): n is a, c, g, or t
  misc_feature (43)..(44): n is a, c, g, or t
  misc_feature (53)..(54): n is a, c, g, or t
tttttttaagcagtggtatcaacgcagagtacnngtgtatggnnggaagagtnntttttttttttttttttttttttttttttt

SEQ ID NO: 1925 - DNA, 84 bp, Artificial
  Barcode component
  misc_feature (33)..(34): n is a, c, g, or t
  misc_feature (43)..(44): n is a, c, g, or t
  misc_feature (53)..(54): n is a, c, g, or t
tttttttaagcagtggtatcaacgcagagtacnngtgtatggnnccaagtagnntttttttttttttttttttttttttttttt

SEQ ID NO: 1926 - DNA, 84 bp, Artificial
  Barcode component
  misc_feature (33)..(34): n is a, c, g, or t
  misc_feature (43)..(44): n is a, c, g, or t
  misc_feature (53)..(54): n is a, c, g, or t
tttttttaagcagtggtatcaacgcagagtacnngtgtatggnnctgaacagnntttttttttttttttttttttttttttttt

SEQ ID NO: 1927 - DNA, 84 bp, Artificial
  Barcode component
  misc_feature (33)..(34): n is a, c, g, or t
  misc_feature (43)..(44): n is a, c, g, or t
  misc_feature (53)..(54): n is a, c, g, or t
tttttttaagcagtggtatcaacgcagagtacnngtgtatggnngtaggttcnntttttttttttttttttttttttttttttt

SEQ ID NO: 1928 - DNA, 84 bp, Artificial
  Barcode component
  misc_feature (33)..(34): n is a, c, g, or t
  misc_feature (43)..(44): n is a, c, g, or t
  misc_feature (53)..(54): n is a, c, g, or t
tttttttaagcagtggtatcaacgcagagtacnngtgtatggnngtatggacnntttttttttttttttttttttttttttttt

SEQ ID NO: 1929 - DNA, 84 bp, Artificial
  Barcode component
  misc_feature (33)..(34): n is a, c, g, or t
  misc_feature (43)..(44): n is a, c, g, or t
  misc_feature (53)..(54): n is a, c, g, or t
tttttttaagcagtggtatcaacgcagagtacnngtgtatggnntcgcaacanntttttttttttttttttttttttttttttt

SEQ ID NO: 1930 - DNA, 84 bp, Artificial
  Barcode component
  misc_feature (33)..(34): n is a, c, g, or t
  misc_feature (43)..(44): n is a, c, g, or t
  misc_feature (53)..(54): n is a, c, g, or t
tttttttaagcagtggtatcaacgcagagtacnngtgtatggnnccgctaatnntttttttttttttttttttttttttttttt

SEQ ID NO: 1931 - DNA, 84 bp, Artificial
  Barcode component
  misc_feature (33)..(34): n is a, c, g, or t
  misc_feature (43)..(44): n is a, c, g, or t
  misc_feature (53)..(54): n is a, c, g, or t
tttttttaagcagtggtatcaacgcagagtacnngtgtatggnngattcgcanntttttttttttttttttttttttttttttt

SEQ ID NO: 1932 - DNA, 84 bp, Artificial
  Barcode component
  misc_feature (33)..(34): n is a, c, g, or t
  misc_feature (43)..(44): n is a, c, g, or t
  misc_feature (53)..(54): n is a, c, g, or t
tttttttaagcagtggtatcaacgcagagtacnngtgtatggnncgatggaanntttttttttttttttttttttttttttttt

SEQ ID NO: 1933 - DNA, 84 bp, Artificial
  Barcode component
  misc_feature (33)..(34): n is a, c, g, or t
  misc_feature (43)..(44): n is a, c, g, or t
  misc_feature (53)..(54): n is a, c, g, or t
tttttttaagcagtggtatcaacgcagagtacnngtgtatggnnagcaagganntttttttttttttttttttttttttttttt

SEQ ID NO: 1934 - DNA, 84 bp, Artificial
  Barcode component
  misc_feature (33)..(34): n is a, c, g, or t
  misc_feature (43)..(44): n is a, c, g, or t
  misc_feature (53)..(54): n is a, c, g, or t
tttttttaagcagtggtatcaacgcagagtacnngtgtatggnncgtagcaanntttttttttttttttttttttttttttttt

SEQ ID NO: 1935 - DNA, 84 bp, Artificial
  Barcode component
  misc_feature (33)..(34): n is a, c, g, or t
  misc_feature (43)..(44): n is a, c, g, or t
  misc_feature (53)..(54): n is a, c, g, or t
tttttttaagcagtggtatcaacgcagagtacnngtgtatggnntggcagtanntttttttttttttttttttttttttttttt

SEQ ID NO: 1936 - DNA, 84 bp, Artificial
  Barcode component
  misc_feature (33)..(34): n is a, c, g, or t
  misc_feature (43)..(44): n is a, c, g, or t
  misc_feature (53)..(54): n is a, c, g, or t
tttttttaagcagtggtatcaacgcagagtacnngtgtatggnncggtagttnntttttttttttttttttttttttttttttt

SEQ ID NO: 1937 - DNA, 84 bp, Artificial
  Barcode component
  misc_feature (33)..(34): n is a, c, g, or t
  misc_feature (43)..(44): n is a, c, g, or t
  misc_feature (53)..(54): n is a, c, g, or t
tttttttaagcagtggtatcaacgcagagtacnngtgtatggnntgacttcgnntttttttttttttttttttttttttttttt

SEQ ID NO: 1938 - DNA, 84 bp, Artificial
  Barcode component
  misc_feature (33)..(34): n is a, c, g, or t
  misc_feature (43)..(44): n is a, c, g, or t
  misc_feature (53)..(54): n is a, c, g, or t
tttttttaagcagtggtatcaacgcagagtacnngtgtatggnngagtgcaanntttttttttttttttttttttttttttttt

SEQ ID NO: 1939 - DNA, 84 bp, Artificial
  Barcode component
  misc_feature (33)..(34): n is a, c, g, or t
  misc_feature (43)..(44): n is a, c, g, or t
  misc_feature (53)..(54): n is a, c, g, or t
tttttttaagcagtggtatcaacgcagagtacnngtgtatggnnacggtaacnntttttttttttttttttttttttttttttt

SEQ ID NO: 1940 - DNA, 84 bp, Artificial
  Barcode component
  misc_feature (33)..(34): n is a, c, g, or t
  misc_feature (43)..(44): n is a, c, g, or t
  misc_feature (53)..(54): n is a, c, g, or t
tttttttaagcagtggtatcaacgcagagtacnngtgtatggnnaagtggtgnntttttttttttttttttttttttttttttt

SEQ ID NO: 1941 - DNA, 84 bp, Artificial
  Barcode component
  misc_feature (33)..(34): n is a, c, g, or t
  misc_feature (43)..(44): n is a, c, g, or t
  misc_feature (53)..(54): n is a, c, g, or t
tttttttaagcagtggtatcaacgcagagtacnngtgtatggnnggagacaanntttttttttttttttttttttttttttttt

SEQ ID NO: 1942 - DNA, 84 bp, Artificial
  Barcode component
  misc_feature (33)..(34): n is a, c, g, or t
  misc_feature (43)..(44): n is a, c, g, or t
  misc_feature (53)..(54): n is a, c, g, or t
tttttttaagcagtggtatcaacgcagagtacnngtgtatggnntcaaggacnntttttttttttttttttttttttttttttt

SEQ ID NO: 1943 - DNA, 84 bp, Artificial
  Barcode component
  misc_feature (33)..(34): n is a, c, g, or t
  misc_feature (43)..(44): n is a, c, g, or t
  misc_feature (53)..(54): n is a, c, g, or t
tttttttaagcagtggtatcaacgcagagtacnngtgtatggnnaagagagcnntttttttttttttttttttttttttttttt

SEQ ID NO: 1944 - DNA, 84 bp, Artificial
  Barcode component
  misc_feature (33)..(34): n is a, c, g, or t
  misc_feature (43)..(44): n is a, c, g, or t
  misc_feature (53)..(54): n is a, c, g, or t
tttttttaagcagtggtatcaacgcagagtacnngtgtatggnncgagagatnntttttttttttttttttttttttttttttt

SEQ ID NO: 1945 - DNA, 84 bp, Artificial
  Barcode component
  misc_feature (33)..(34): n is a, c, g, or t
  misc_feature (43)..(44): n is a, c, g, or t
  misc_feature (53)..(54): n is a, c, g, or t
tttttttaagcagtggtatcaacgcagagtacnngtgtatggnnacagatggnntttttttttttttttttttttttttttttt

SEQ ID NO: 1946 - DNA, 84 bp, Artificial
  Barcode component
  misc_feature (33)..(34): n is a, c, g, or t
  misc_feature (43)..(44): n is a, c, g, or t
  misc_feature (53)..(54): n is a, c, g, or t
tttttttaagcagtggtatcaacgcagagtacnngtgtatggnnaggagtcanntttttttttttttttttttttttttttttt

SEQ ID NO: 1947 - DNA, 84 bp, Artificial
  Barcode component
  misc_feature (33)..(34): n is a, c, g, or t
  misc_feature (43)..(44): n is a, c, g, or t
  misc_feature (53)..(54): n is a, c, g, or t
tttttttaagcagtggtatcaacgcagagtacnngtgtatggnncgtgttacnntttttttttttttttttttttttttttttt

SEQ ID NO: 1948 - DNA, 84 bp, Artificial
  Barcode component
  misc_feature (33)..(34): n is a, c, g, or t
  misc_feature (43)..(44): n is a, c, g, or t
  misc_feature (53)..(54): n is a, c, g, or t
tttttttaagcagtggtatcaacgcagagtacnngtgtatggnntagtgtgcnntttttttttttttttttttttttttttttt

SEQ ID NO: 1949 - DNA, 84 bp, Artificial
  Barcode component
  misc_feature (33)..(34): n is a, c, g, or t
  misc_feature (43)..(44): n is a, c, g, or t
  misc_feature (53)..(54): n is a, c, g, or t
tttttttaagcagtggtatcaacgcagagtacnngtgtatggnnctcatgacnntttttttttttttttttttttttttttttt

SEQ ID NO: 1950 - DNA, 84 bp, Artificial
  Barcode component
  misc_feature (33)..(34): n is a, c, g, or t
  misc_feature (43)..(44): n is a, c, g, or t
  misc_feature (53)..(54): n is a, c, g, or t
tttttttaagcagtggtatcaacgcagagtacnngtgtatggnngtatccagnntttttttttttttttttttttttttttttt

SEQ ID NO: 1951 - DNA, 84 bp, Artificial
  Barcode component
  misc_feature (33)..(34): n is a, c, g, or t
  misc_feature (43)..(44): n is a, c, g, or t
  misc_feature (53)..(54): n is a, c, g, or t
tttttttaagcagtggtatcaacgcagagtacnngtgtatggnnacgcctatnntttttttttttttttttttttttttttttt

SEQ ID NO: 1952 - DNA, 84 bp, Artificial
  Barcode component
  misc_feature (33)..(34): n is a, c, g, or t
  misc_feature (43)..(44): n is a, c, g, or t
  misc_feature (53)..(54): n is a, c, g, or t
tttttttaagcagtggtatcaacgcagagtacnngtgtatggnnaacgacctnntttttttttttttttttttttttttttttt

SEQ ID NO: 1953 - DNA, 84 bp, Artificial
  Barcode component
  misc_feature (33)..(34): n is a, c, g, or t
  misc_feature (43)..(44): n is a, c, g, or t
  misc_feature (53)..(54): n is a, c, g, or t
tttttttaagcagtggtatcaacgcagagtacnngtgtatggnnatcaggctnntttttttttttttttttttttttttttttt

SEQ ID NO: 1954 - DNA, 84 bp, Artificial
  Barcode component
  misc_feature (33)..(34): n is a, c, g, or t
  misc_feature (43)..(44): n is a, c, g, or t
  misc_feature (53)..(54): n is a, c, g, or t
tttttttaagcagtggtatcaacgcagagtacnngtgtatggnncaagttcgnntttttttttttttttttttttttttttttt

SEQ ID NO: 1955 - DNA, 84 bp, Artificial
  Barcode component
  misc_feature (33)..(34): n is a, c, g, or t
  misc_feature (43)..(44): n is a, c, g, or t
  misc_feature (53)..(54): n is a, c, g, or t
tttttttaagcagtggtatcaacgcagagtacnngtgtatggnntagccaganntttttttttttttttttttttttttttttt

SEQ ID NO: 1956 - DNA, 84 bp, Artificial
  Barcode component
  misc_feature (33)..(34): n is a, c, g, or t
  misc_feature (43)..(44): n is a, c, g, or t
  misc_feature (53)..(54): n is a, c, g, or t
tttttttaagcagtggtatcaacgcagagtacnngtgtatggnncaatcacgnntttttttttttttttttttttttttttttt

SEQ ID NO: 1957 - DNA, 84 bp, Artificial
  Barcode component
  misc_feature (33)..(34): n is a, c, g, or t
  misc_feature (43)..(44): n is a, c, g, or t
  misc_feature (53)..(54): n is a, c, g, or t
tttttttaagcagtggtatcaacgcagagtacnngtgtatggnngcaacaagnntttttttttttttttttttttttttttttt

SEQ ID NO: 1958 - DNA, 84 bp, Artificial
  Barcode component
  misc_feature (33)..(34): n is a, c, g, or t
  misc_feature (43)..(44): n is a, c, g, or t
  misc_feature (53)..(54): n is a, c, g, or t
tttttttaagcagtggtatcaacgcagagtacnngtgtatggnncacgacaanntttttttttttttttttttttttttttttt

SEQ ID NO: 1959 - DNA, 84 bp, Artificial
  Barcode component
  misc_feature (33)..(34): n is a, c, g, or t
  misc_feature (43)..(44): n is a, c, g, or t
  misc_feature (53)..(54): n is a, c, g, or t
tttttttaagcagtggtatcaacgcagagtacnngtgtatggnntacggaganntttttttttttttttttttttttttttttt

SEQ ID NO: 1960 - DNA, 84 bp, Artificial
  Barcode component
  misc_feature (33)..(34): n is a, c, g, or t
  misc_feature (43)..(44): n is a, c, g, or t
  misc_feature (53)..(54): n is a, c, g, or t
tttttttaagcagtggtatcaacgcagagtacnngtgtatggnncgacaaganntttttttttttttttttttttttttttttt

SEQ ID NO: 1961 - DNA, 84 bp, Artificial
  Barcode component
  misc_feature (33)..(34): n is a, c, g, or t
  misc_feature (43)..(44): n is a, c, g, or t
  misc_feature (53)..(54): n is a, c, g, or t
tttttttaagcagtggtatcaacgcagagtacnngtgtatggnncgaagtganntttttttttttttttttttttttttttttt

SEQ ID NO: 1962 - DNA, 84 bp, Artificial
  Barcode component
  misc_feature (33)..(34): n is a, c, g, or t
  misc_feature (43)..(44): n is a, c, g, or t
  misc_feature (53)..(54): n is a, c, g, or t
tttttttaagcagtggtatcaacgcagagtacnngtgtatggnnagctggtanntttttttttttttttttttttttttttttt

SEQ ID NO: 1963 - DNA, 84 bp, Artificial
  Barcode component
  misc_feature (33)..(34): n is a, c, g, or t
  misc_feature (43)..(44): n is a, c, g, or t
  misc_feature (53)..(54): n is a, c, g, or t
tttttttaagcagtggtatcaacgcagagtacnngtgtatggnnaactaggcnntttttttttttttttttttttttttttttt

SEQ ID NO: 1964 - DNA, 84 bp, Artificial
  Barcode component
  misc_feature (33)..(34): n is a, c, g, or t
  misc_feature (43)..(44): n is a, c, g, or t
  misc_feature (53)..(54): n is a, c, g, or t
tttttttaagcagtggtatcaacgcagagtacnngtgtatggnncagcaagtnntttttttttttttttttttttttttttttt

SEQ ID NO: 1965 - DNA, 84 bp, Artificial
  Barcode component
  misc_feature (33)..(34): n is a, c, g, or t
  misc_feature (43)..(44): n is a, c, g, or t
  misc_feature (53)..(54): n is a, c, g, or t
tttttttaagcagtggtatcaacgcagagtacnngtgtatggnnacgaggtanntttttttttttttttttttttttttttttt

SEQ ID NO: 1966 - DNA, 84 bp, Artificial
  Barcode component
  misc_feature (33)..(34): n is a, c, g, or t
  misc_feature (43)..(44): n is a, c, g, or t
  misc_feature (53)..(54): n is a, c, g, or t
tttttttaagcagtggtatcaacgcagagtacnngtgtatggnncatcttccnntttttttttttttttttttttttttttttt

SEQ ID NO: 1967 - DNA, 84 bp, Artificial
  Barcode component
  misc_feature (33)..(34): n is a, c, g, or t
  misc_feature (43)..(44): n is a, c, g, or t
  misc_feature (53)..(54): n is a, c, g, or t
tttttttaagcagtggtatcaacgcagagtacnngtgtatggnncctgaatcnntttttttttttttttttttttttttttttt

SEQ ID NO: 1968 - DNA, 84 bp, Artificial
  Barcode component
  misc_feature (33)..(34): n is a, c, g, or t
  misc_feature (43)..(44): n is a, c, g, or t
  misc_feature (53)..(54): n is a, c, g, or t
tttttttaagcagtggtatcaacgcagagtacnngtgtatggnntgcagactnntttttttttttttttttttttttttttttt

SEQ ID NO: 1969 - DNA, 84 bp, Artificial
  Barcode component
  misc_feature (33)..(34): n is a, c, g, or t
  misc_feature (43)..(44): n is a, c, g, or t
  misc_feature (53)..(54): n is a, c, g, or t
tttttttaagcagtggtatcaacgcagagtacnngtgtatggnnagatgtggnntttttttttttttttttttttttttttttt

SEQ ID NO: 1970 - DNA, 84 bp, Artificial
  Barcode component
  misc_feature (33)..(34): n is a, c, g, or t
  misc_feature (43)..(44): n is a, c, g, or t
  misc_feature (53)..(54): n is a, c, g, or t
tttttttaagcagtggtatcaacgcagagtacnngtgtatggnnagttcgacnntttttttttttttttttttttttttttttt

SEQ ID NO: 1971 - DNA, 84 bp, Artificial
  Barcode component
  misc_feature (33)..(34): n is a, c, g, or t
  misc_feature (43)..(44): n is a, c, g, or t
  misc_feature (53)..(54): n is a, c, g, or t
tttttttaagcagtggtatcaacgcagagtacnngtgtatggnnacaacctcnntttttttttttttttttttttttttttttt

SEQ ID NO: 1972 - DNA, 84 bp, Artificial
  Barcode component
  misc_feature (33)..(34): n is a, c, g, or t
  misc_feature (43)..(44): n is a, c, g, or t
  misc_feature (53)..(54): n is a, c, g, or t
tttttttaagcagtggtatcaacgcagagtacnngtgtatggnncatggtagnntttttttttttttttttttttttttttttt

SEQ ID NO: 1973 - DNA, 84 bp, Artificial
  Barcode component
  misc_feature (33)..(34): n is a, c, g, or t
  misc_feature (43)..(44): n is a, c, g, or t
  misc_feature (53)..(54): n is a, c, g, or t
tttttttaagcagtggtatcaacgcagagtacnngtgtatggnncgtatctcnntttttttttttttttttttttttttttttt

SEQ ID NO: 1974 - DNA, 84 bp, Artificial
  Barcode component
  misc_feature (33)..(34): n is a, c, g, or t
  misc_feature (43)..(44): n is a, c, g, or t
  misc_feature (53)..(54): n is a, c, g, or t
tttttttaagcagtggtatcaacgcagagtacnngtgtatggnncctagttcnntttttttttttttttttttttttttttttt

SEQ ID NO: 1975 - DNA, 84 bp, Artificial
  Barcode component
  misc_feature (33)..(34): n is a, c, g, or t
  misc_feature (43)..(44): n is a, c, g, or t
  misc_feature (53)..(54): n is a, c, g, or t
tttttttaagcagtggtatcaacgcagagtacnngtgtatggnncaagagtcnntttttttttttttttttttttttttttttt

SEQ ID NO: 1976 - DNA, 84 bp, Artificial
  Barcode component
  misc_feature (33)..(34): n is a, c, g, or t
  misc_feature (43)..(44): n is a, c, g, or t
  misc_feature (53)..(54): n is a, c, g, or t
tttttttaagcagtggtatcaacgcagagtacnnccggttaannaatcggcanntttttttttttttttttttttttttttttt

SEQ ID NO: 1977 - DNA, 84 bp, Artificial
  Barcode component
  misc_feature (33)..(34): n is a, c, g, or t
  misc_feature (43)..(44): n is a, c, g, or t
  misc_feature (53)..(54): n is a, c, g, or t
tttttttaagcagtggtatcaacgcagagtacnnccggttaanntacggcatnntttttttttttttttttttttttttttttt

SEQ ID NO: 1978 - DNA, 84 bp, Artificial
  Barcode component
  misc_feature (33)..(34): n is a, c, g, or t
  misc_feature (43)..(44): n is a, c, g, or t
  misc_feature (53)..(54): n is a, c, g, or t
tttttttaagcagtggtatcaacgcagagtacnnccggttaannttggatcgnntttttttttttttttttttttttttttttt

SEQ ID NO: 1979 - DNA, 84 bp, Artificial
  Barcode component
  misc_feature (33)..(34): n is a, c, g, or t
  misc_feature (43)..(44): n is a, c, g, or t
  misc_feature (53)..(54): n is a, c, g, or t
tttttttaagcagtggtatcaacgcagagtacnnccggttaanntggaacganntttttttttttttttttttttttttttttt

SEQ ID NO: 1980 - DNA, 84 bp, Artificial
  Barcode component
  misc_feature (33)..(34): n is a, c, g, or t
  misc_feature (43)..(44): n is a, c, g, or t
  misc_feature (53)..(54): n is a, c, g, or t
tttttttaagcagtggtatcaacgcagagtacnnccggttaannggcaatcanntttttttttttttttttttttttttttttt

SEQ ID NO: 1981 - DNA, 84 bp, Artificial
  Barcode component
  misc_feature (33)..(34): n is a, c, g, or t
  misc_feature (43)..(44): n is a, c, g, or t
  misc_feature (53)..(54): n is a, c, g, or t
tttttttaagcagtggtatcaacgcagagtacnnccggttaanngaatccganntttttttttttttttttttttttttttttt

SEQ ID NO: 1982 - DNA, 84 bp, Artificial
  Barcode component
  misc_feature (33)..(34): n is a, c, g, or t
  misc_feature (43)..(44): n is a, c, g, or t
  misc_feature (53)..(54): n is a, c, g, or t
tttttttaagcagtggtatcaacgcagagtacnnccggttaannttacggtgnntttttttttttttttttttttttttttttt

SEQ ID NO: 1983 - DNA, 84 bp, Artificial
  Barcode component
  misc_feature (33)..(34): n is a, c, g, or t
  misc_feature (43)..(44): n is a, c, g, or t
  misc_feature (53)..(54): n is a, c, g, or t
tttttttaagcagtggtatcaacgcagagtacnnccggttaanncatatcggnntttttttttttttttttttttttttttttt

SEQ ID NO: 1984 - DNA, 84 bp, Artificial
  Barcode component
  misc_feature (33)..(34): n is a, c, g, or t
  misc_feature (43)..(44): n is a, c, g, or t
  misc_feature (53)..(54): n is a, c, g, or t
tttttttaagcagtggtatcaacgcagagtacnnccggttaanncttcggtanntttttttttttttttttttttttttttttt

SEQ ID NO: 1985 - DNA, 84 bp, Artificial
  Barcode component
  misc_feature (33)..(34): n is a, c, g, or t
  misc_feature (43)..(44): n is a, c, g, or t
  misc_feature (53)..(54): n is a, c, g, or t
tttttttaagcagtggtatcaacgcagagtacnnccggttaanntcctaacgnntttttttttttttttttttttttttttttt

SEQ ID NO: 1986 - DNA, 84 bp, Artificial
  Barcode component
  misc_feature (33)..(34): n is a, c, g, or t
  misc_feature (43)..(44): n is a, c, g, or t
  misc_feature (53)..(54): n is a, c, g, or t
tttttttaagcagtggtatcaacgcagagtacnnccggttaanngtaagccanntttttttttttttttttttttttttttttt

SEQ ID NO: 1987 - DNA, 84 bp, Artificial
  Barcode component
  misc_feature (33)..(34): n is a, c, g, or t
  misc_feature (43)..(44): n is a, c, g, or t
  misc_feature (53)..(54): n is a, c, g, or t
tttttttaagcagtggtatcaacgcagagtacnnccggttaanntaaggtggnntttttttttttttttttttttttttttttt

SEQ ID NO: 1988 - DNA, 84 bp, Artificial
  Barcode component
  misc_feature (33)..(34): n is a, c, g, or t
  misc_feature (43)..(44): n is a, c, g, or t
  misc_feature (53)..(54): n is a, c, g, or t
tttttttaagcagtggtatcaacgcagagtacnnccggttaannggtaagctnntttttttttttttttttttttttttttttt

SEQ ID NO: 1989 - DNA, 84 bp, Artificial
  Barcode component
  misc_feature (33)..(34): n is a, c, g, or t
  misc_feature (43)..(44): n is a, c, g, or t
  misc_feature (53)..(54): n is a, c, g, or t
tttttttaagcagtggtatcaacgcagagtacnnccggttaanntgtgtcganntttttttttttttttttttttttttttttt

SEQ ID NO: 1990 - DNA, 84 bp, Artificial
  Barcode component
  misc_feature (33)..(34): n is a, c, g, or t
  misc_feature (43)..(44): n is a, c, g, or t
  misc_feature (53)..(54): n is a, c, g, or t
tttttttaagcagtggtatcaacgcagagtacnnccggttaanngagcatganntttttttttttttttttttttttttttttt

SEQ ID NO: 1991 - DNA, 84 bp, Artificial
  Barcode component
  misc_feature (33)..(34): n is a, c, g, or t
  misc_feature (43)..(44): n is a, c, g, or t
  misc_feature (53)..(54): n is a, c, g, or t
tttttttaagcagtggtatcaacgcagagtacnnccggttaanntcgaagtcnntttttttttttttttttttttttttttttt

SEQ ID NO: 1992 - DNA, 84 bp, Artificial
  Barcode component
  misc_feature (33)..(34): n is a, c, g, or t
  misc_feature (43)..(44): n is a, c, g, or t
  misc_feature (53)..(54): n is a, c, g, or t
tttttttaagcagtggtatcaacgcagagtacnnccggttaannggtgaacanntttttttttttttttttttttttttttttt

SEQ ID NO: 1993 - DNA, 84 bp, Artificial
  Barcode component
  misc_feature (33)..(34): n is a, c, g, or t
  misc_feature (43)..(44): n is a, c, g, or t
  misc_feature (53)..(54): n is a, c, g, or t
tttttttaagcagtggtatcaacgcagagtacnnccggttaannacatgcacnntttttttttttttttttttttttttttttt

SEQ ID NO: 1994 - DNA, 84 bp, Artificial
  Barcode component
  misc_feature (33)..(34): n is a, c, g, or t
  misc_feature (43)..(44): n is a, c, g, or t
  misc_feature (53)..(54): n is a, c, g, or t
tttttttaagcagtggtatcaacgcagagtacnnccggttaannccaacagtnntttttttttttttttttttttttttttttt

SEQ ID NO: 1995 - DNA, 84 bp, Artificial
  Barcode component
  misc_feature (33)..(34): n is a, c, g, or t
  misc_feature (43)..(44): n is a, c, g, or t
  misc_feature (53)..(54): n is a, c, g, or t
tttttttaagcagtggtatcaacgcagagtacnnccggttaannagaacagcnntttttttttttttttttttttttttttttt

SEQ ID NO: 1996 - DNA, 84 bp, Artificial
  Barcode component
  misc_feature (33)..(34): n is a, c, g, or t
  misc_feature (43)..(44): n is a, c, g, or t
  misc_feature (53)..(54): n is a, c, g, or t
tttttttaagcagtggtatcaacgcagagtacnnccggttaanngaacacgtnntttttttttttttttttttttttttttttt

SEQ ID NO: 1997 - DNA, 84 bp, Artificial
  Barcode component
  misc_feature (33)..(34): n is a, c, g, or t
  misc_feature (43)..(44): n is a, c, g, or t
  misc_feature (53)..(54): n is a, c, g, or t
tttttttaagcagtggtatcaacgcagagtacnnccggttaannggtcttcanntttttttttttttttttttttttttttttt

SEQ ID NO: 1998 - DNA, 84 bp, Artificial
  Barcode component
  misc_feature (33)..(34): n is a, c, g, or t
  misc_feature (43)..(44): n is a, c, g, or t
  misc_feature (53)..(54): n is a, c, g, or t
tttttttaagcagtggtatcaacgcagagtacnnccggttaannaggttcagnntttttttttttttttttttttttttttttt

SEQ ID NO: 1999 - DNA, 84 bp, Artificial
  Barcode component
  misc_feature (33)..(34): n is a, c, g, or t
  misc_feature (43)..(44): n is a, c, g, or t
  misc_feature (53)..(54): n is a, c, g, or t
tttttttaagcagtggtatcaacgcagagtacnnccggttaannctagagcanntttttttttttttttttttttttttttttt

SEQ ID NO: 2000 - DNA, 84 bp, Artificial
  Barcode component
  misc_feature (33)..(34): n is a, c, g, or t
  misc_feature (43)..(44): n is a, c, g, or t
  misc_feature (53)..(54): n is a, c, g, or t
tttttttaagcagtggtatcaacgcagagtacnnccggttaanncttctagcnntttttttttttttttttttttttttttttt

SEQ ID NO: 2001 - DNA, 84 bp, Artificial
  Barcode component
  misc_feature (33)..(34): n is a, c, g, or t
  misc_feature (43)..(44): n is a, c, g, or t
  misc_feature (53)..(54): n is a, c, g, or t
tttttttaagcagtggtatcaacgcagagtacnnccggttaanngagtaacgnntttttttttttttttttttttttttttttt

SEQ ID NO: 2002 - DNA, 84 bp, Artificial
  Barcode component
  misc_feature (33)..(34): n is a, c, g, or t
  misc_feature (43)..(44): n is a, c, g, or t
  misc_feature (53)..(54): n is a, c, g, or t
tttttttaagcagtggtatcaacgcagagtacnnccggttaannctaagaggnntttttttttttttttttttttttttttttt

SEQ ID NO: 2003 - DNA, 84 bp, Artificial
  Barcode component
  misc_feature (33)..(34): n is a, c, g, or t
  misc_feature (43)..(44): n is a, c, g, or t
  misc_feature (53)..(54): n is a, c, g, or t
tttttttaagcagtggtatcaacgcagagtacnnccggttaannacgtgtagnntttttttttttttttttttttttttttttt

SEQ ID NO: 2004 - DNA, 84 bp, Artificial
  Barcode component
  misc_feature (33)..(34): n is a, c, g, or t
  misc_feature (43)..(44): n is a, c, g, or t
  misc_feature (53)..(54): n is a, c, g, or t
tttttttaagcagtggtatcaacgcagagtacnnccggttaannactacaggnntttttttttttttttttttttttttttttt

SEQ ID NO: 2005 - DNA, 84 bp, Artificial
  Barcode component
  misc_feature (33)..(34): n is a, c, g, or t
  misc_feature (43)..(44): n is a, c, g, or t
  misc_feature (53)..(54): n is a, c, g, or t
tttttttaagcagtggtatcaacgcagagtacnnccggttaanntacaggtcnntttttttttttttttttttttttttttttt

SEQ ID NO: 2006 - DNA, 84 bp, Artificial
  Barcode component
  misc_feature (33)..(34): n is a, c, g, or t
  misc_feature (43)..(44): n is a, c, g, or t
  misc_feature (53)..(54): n is a, c, g, or t
tttttttaagcagtggtatcaacgcagagtacnnccggttaannctcacatgnntttttttttttttttttttttttttttttt

SEQ ID NO: 2007 - DNA, 84 bp, Artificial
  Barcode component
  misc_feature (33)..(34): n is a, c, g, or t
  misc_feature (43)..(44): n is a, c, g, or t
  misc_feature (53)..(54): n is a, c, g, or t
tttttttaagcagtggtatcaacgcagagtacnnccggttaannactaggagnntttttttttttttttttttttttttttttt

SEQ ID NO: 2008 - DNA, 84 bp, Artificial
  Barcode component
  misc_feature (33)..(34): n is a, c, g, or t
  misc_feature (43)..(44): n is a, c, g, or t
  misc_feature (53)..(54): n is a, c, g, or t
tttttttaagcagtggtatcaacgcagagtacnnccggttaannccatagganntttttttttttttttttttttttttttttt

SEQ ID NO: 2009 - DNA, 84 bp, Artificial
  Barcode component
  misc_feature (33)..(34): n is a, c, g, or t
  misc_feature (43)..(44): n is a, c, g, or t
  misc_feature (53)..(54): n is a, c, g, or t
tttttttaagcagtggtatcaacgcagagtacnnccggttaannggagaatcnntttttttttttttttttttttttttttttt

SEQ ID NO: 2010 - DNA, 84 bp, Artificial
  Barcode component
  misc_feature (33)..(34): n is a, c, g, or t
  misc_feature (43)..(44): n is a, c, g, or t
  misc_feature (53)..(54): n is a, c, g, or t
tttttttaagcagtggtatcaacgcagagtacnnccggttaanngccaagaanntttttttttttttttttttttttttttttt

SEQ ID NO: 2011 - DNA, 84 bp, Artificial
  Barcode component
  misc_feature (33)..(34): n is a, c, g, or t
  misc_feature (43)..(44): n is a, c, g, or t
  misc_feature (53)..(54): n is a, c, g, or t
tttttttaagcagtggtatcaacgcagagtacnnccggttaannaaggcaagnntttttttttttttttttttttttttttttt

SEQ ID NO: 2012 - DNA, 84 bp, Artificial
  Barcode component
  misc_feature (33)..(34): n is a, c, g, or t
  misc_feature (43)..(44): n is a, c, g, or t
  misc_feature (53)..(54): n is a, c, g, or t
tttttttaagcagtggtatcaacgcagagtacnnccggttaannaatgtcgcnntttttttttttttttttttttttttttttt

SEQ ID NO: 2013 - DNA, 84 bp, Artificial
  Barcode component
  misc_feature (33)..(34): n is a, c, g, or t
  misc_feature (43)..(44): n is a, c, g, or t
  misc_feature (53)..(54): n is a, c, g, or t
tttttttaagcagtggtatcaacgcagagtacnnccggttaannatggaaccnntttttttttttttttttttttttttttttt

SEQ ID NO: 2014 - DNA, 84 bp, Artificial
  Barcode component
  misc_feature (33)..(34): n is a, c, g, or t
  misc_feature (43)..(44): n is a, c, g, or t
  misc_feature (53)..(54): n is a, c, g, or t
tttttttaagcagtggtatcaacgcagagtacnnccggttaannagaggcatnntttttttttttttttttttttttttttttt

SEQ ID NO: 2015 - DNA, 84 bp, Artificial
  Barcode component
  misc_feature (33)..(34): n is a, c, g, or t
  misc_feature (43)..(44): n is a, c, g, or t
  misc_feature (53)..(54): n is a, c, g, or t
tttttttaagcagtggtatcaacgcagagtacnnccggttaanntgcatagcnntttttttttttttttttttttttttttttt

SEQ ID NO: 2016 - DNA, 84 bp, Artificial
  Barcode component
  misc_feature (33)..(34): n is a, c, g, or t
  misc_feature (43)..(44): n is a, c, g, or t
  misc_feature (53)..(54): n is a, c, g, or t
tttttttaagcagtggtatcaacgcagagtacnnccggttaannctaacgganntttttttttttttttttttttttttttttt

SEQ ID NO: 2017 - DNA, 84 bp, Artificial
  Barcode component
  misc_feature (33)..(34): n is a, c, g, or t
  misc_feature (43)..(44): n is a, c, g, or t
  misc_feature (53)..(54): n is a, c, g, or t
tttttttaagcagtggtatcaacgcagagtacnnccggttaanntatcgaggnntttttttttttttttttttttttttttttt

SEQ ID NO: 2018 - DNA, 84 bp, Artificial
  Barcode component
  misc_feature (33)..(34): n is a, c, g, or t
  misc_feature (43)..(44): n is a, c, g, or t
  misc_feature (53)..(54): n is a, c, g, or t
tttttttaagcagtggtatcaacgcagagtacnnccggttaanncatagcctnntttttttttttttttttttttttttttttt

SEQ ID NO: 2019 - DNA, 84 bp, Artificial
  Barcode component
  misc_feature (33)..(34): n is a, c, g, or t
  misc_feature (43)..(44): n is a, c, g, or t
  misc_feature (53)..(54): n is a, c, g, or t
tttttttaagcagtggtatcaacgcagagtacnnccggttaannatcgagacnntttttttttttttttttttttttttttttt

SEQ ID NO: 2020 - DNA, 84 bp, Artificial
  Barcode component
  misc_feature (33)..(34): n is a, c, g, or t
  misc_feature (43)..(44): n is a, c, g, or t
  misc_feature (53)..(54): n is a, c, g, or t
tttttttaagcagtggtatcaacgcagagtacnnccggttaannggaagagtnntttttttttttttttttttttttttttttt

SEQ ID NO: 2021 - DNA, 84 bp, Artificial
  Barcode component
  misc_feature (33)..(34): n is a, c, g, or t
  misc_feature (43)..(44): n is a, c, g, or t
  misc_feature (53)..(54): n is a, c, g, or t
tttttttaagcagtggtatcaacgcagagtacnnccggttaannccaagtagnntttttttttttttttttttttttttttttt

SEQ ID NO: 2022 - DNA, 84 bp, Artificial
  Barcode component
  misc_feature (33)..(34): n is a, c, g, or t
  misc_feature (43)..(44): n is a, c, g, or t
  misc_feature (53)..(54): n is a, c, g, or t
tttttttaagcagtggtatcaacgcagagtacnnccggttaannctgaacagnntttttttttttttttttttttttttttttt

SEQ ID NO: 2023 - DNA, 84 bp, Artificial
  Barcode component
  misc_feature (33)..(34): n is a, c, g, or t
  misc_feature (43)..(44): n is a, c, g, or t
  misc_feature (53)..(54): n is a, c, g, or t
tttttttaagcagtggtatcaacgcagagtacnnccggttaanngtaggttcnntttttttttttttttttttttttttttttt

SEQ ID NO: 2024 - DNA, 84 bp, Artificial
  Barcode component
  misc_feature (33)..(34): n is a, c, g, or t
  misc_feature (43)..(44): n is a, c, g, or t
  misc_feature (53)..(54): n is a, c, g, or t
tttttttaagcagtggtatcaacgcagagtacnnccggttaanngtatggacnntttttttttttttttttttttttttttttt

SEQ ID NO: 2025 - DNA, 84 bp, Artificial
  Barcode component
  misc_feature (33)..(34): n is a, c, g, or t
  misc_feature (43)..(44): n is a, c, g, or t
  misc_feature (53)..(54): n is a, c, g, or t
tttttttaagcagtggtatcaacgcagagtacnnccggttaanntcgcaacanntttttttttttttttttttttttttttttt

SEQ ID NO: 2026 - DNA, 84 bp, Artificial
  Barcode component
  misc_feature (33)..(34): n is a, c, g, or t
  misc_feature (43)..(44): n is a, c, g, or t
  misc_feature (53)..(54): n is a, c, g, or t
tttttttaagcagtggtatcaacgcagagtacnnccggttaannccgctaatnntttttttttttttttttttttttttttttt

SEQ ID NO: 2027 - DNA, 84 bp, Artificial
  Barcode component
  misc_feature (33)..(34): n is a, c, g, or t
  misc_feature (43)..(44): n is a, c, g, or t
  misc_feature (53)..(54): n is a, c, g, or t
tttttttaagcagtggtatcaacgcagagtacnnccggttaanngattcgcanntttttttttttttttttttttttttttttt

SEQ ID NO: 2028 - DNA, 84 bp, Artificial
  Barcode component
  misc_feature (33)..(34): n is a, c, g, or t
  misc_feature (43)..(44): n is a, c, g, or t
  misc_feature (53)..(54): n is a, c, g, or t
tttttttaagcagtggtatcaacgcagagtacnnccggttaanncgatggaanntttttttttttttttttttttttttttttt

SEQ ID NO: 2029 - DNA, 84 bp, Artificial
  Barcode component
  misc_feature (33)..(34): n is a, c, g, or t
  misc_feature (43)..(44): n is a, c, g, or t
  misc_feature (53)..(54): n is a, c, g, or t
tttttttaagcagtggtatcaacgcagagtacnnccggttaannagcaagganntttttttttttttttttttttttttttttt

SEQ ID NO: 2030 - DNA, 84 bp, Artificial
  Barcode component
  misc_feature (33)..(34): n is a, c, g, or t
  misc_feature (43)..(44): n is a, c, g, or t
  misc_feature (53)..(54): n is a, c, g, or t
tttttttaagcagtggtatcaacgcagagtacnnccggttaanncgtagcaanntttttttttttttttttttttttttttttt

SEQ ID NO: 2031 - DNA, 84 bp, Artificial
  Barcode component
  misc_feature (33)..(34): n is a, c, g, or t
  misc_feature (43)..(44): n is a, c, g, or t
  misc_feature (53)..(54): n is a, c, g, or t
tttttttaagcagtggtatcaacgcagagtacnnccggttaanntggcagtanntttttttttttttttttttttttttttttt

SEQ ID NO: 2032 - DNA, 84 bp, Artificial
  Barcode component
  misc_feature (33)..(34): n is a, c, g, or t
  misc_feature (43)..(44): n is a, c, g, or t
  misc_feature (53)..(54): n is a, c, g, or t
tttttttaagcagtggtatcaacgcagagtacnnccggttaanncggtagttnntttttttttttttttttttttttttttttt

SEQ ID NO: 2033 - DNA, 84 bp, Artificial
  Barcode component
  misc_feature (33)..(34): n is a, c, g, or t
  misc_feature (43)..(44): n is a, c, g, or t
  misc_feature (53)..(54): n is a, c, g, or t
tttttttaagcagtggtatcaacgcagagtacnnccggttaanntgacttcgnntttttttttttttttttttttttttttttt

SEQ ID NO: 2034 - DNA, 84 bp, Artificial
  Barcode component
  misc_feature (33)..(34): n is a, c, g, or t
  misc_feature (43)..(44): n is a, c, g, or t
  misc_feature (53)..(54): n is a, c, g, or t
tttttttaagcagtggtatcaacgcagagtacnnccggttaanngagtgcaanntttttttttttttttttttttttttttttt

SEQ ID NO: 2035 - DNA, 84 bp, Artificial
  Barcode component
  misc_feature (33)..(34): n is a, c, g, or t
  misc_feature (43)..(44): n is a, c, g, or t
  misc_feature (53)..(54): n is a, c, g, or t
tttttttaagcagtggtatcaacgcagagtacnnccggttaannacggtaacnntttttttttttttttttttttttttttttt

SEQ ID NO: 2036 - DNA, 84 bp, Artificial
  Barcode component
  misc_feature (33)..(34): n is a, c, g, or t
  misc_feature (43)..(44): n is a, c, g, or t
  misc_feature (53)..(54): n is a, c, g, or t
tttttttaagcagtggtatcaacgcagagtacnnccggttaannaagtggtgnntttttttttttttttttttttttttttttt

SEQ ID NO: 2037 - DNA, 84 bp, Artificial
  Barcode component
  misc_feature (33)..(34): n is a, c, g, or t
  misc_feature (43)..(44): n is a, c, g, or t
  misc_feature (53)..(54): n is a, c, g, or t
tttttttaagcagtggtatcaacgcagagtacnnccggttaannggagacaanntttttttttttttttttttttttttttttt

SEQ ID NO: 2038 - DNA, 84 bp, Artificial
  Barcode component
  misc_feature (33)..(34): n is a, c, g, or t
  misc_feature (43)..(44): n is a, c, g, or t
  misc_feature (53)..(54): n is a, c, g, or t
tttttttaagcagtggtatcaacgcagagtacnnccggttaanntcaaggacnntttttttttttttttttttttttttttttt

SEQ ID NO: 2039 - DNA, 84 bp, Artificial
  Barcode component
  misc_feature (33)..(34): n is a, c, g, or t
  misc_feature (43)..(44): n is a, c, g, or t
  misc_feature (53)..(54): n is a, c, g, or t
tttttttaagcagtggtatcaacgcagagtacnnccggttaannaagagagcnntttttttttttttttttttttttttttttt

SEQ ID NO: 2040 - DNA, 84 bp, Artificial
  Barcode component
  misc_feature (33)..(34): n is a, c, g, or t
  misc_feature (43)..(44): n is a, c, g, or t
  misc_feature (53)..(54): n is a, c, g, or t
tttttttaagcagtggtatcaacgcagagtacnnccggttaanncgagagatnntttttttttttttttttttttttttttttt

SEQ ID NO: 2041 - DNA, 84 bp, Artificial
  Barcode component
  misc_feature (33)..(34): n is a, c, g, or t
  misc_feature (43)..(44): n is a, c, g, or t
  misc_feature (53)..(54): n is a, c, g, or t
tttttttaagcagtggtatcaacgcagagtacnnccggttaannacagatggnntttttttttttttttttttttttttttttt

SEQ ID NO: 2042 - DNA, 84 bp, Artificial
  Barcode component
  misc_feature (33)..(34): n is a, c, g, or t
  misc_feature (43)..(44): n is a, c, g, or t
  misc_feature (53)..(54): n is a, c, g, or t
tttttttaagcagtggtatcaacgcagagtacnnccggttaannaggagtcanntttttttttttttttttttttttttttttt

SEQ ID NO: 2043 - DNA, 84 bp, Artificial
  Barcode component
  misc_feature (33)..(34): n is a, c, g, or t
  misc_feature (43)..(44): n is a, c, g, or t
  misc_feature (53)..(54): n is a, c, g, or t
tttttttaagcagtggtatcaacgcagagtacnnccggttaanncgtgttacnntttttttttttttttttttttttttttttt

SEQ ID NO: 2044 - DNA, 84 bp, Artificial
  Barcode component
  misc_feature (33)..(34): n is a, c, g, or t
  misc_feature (43)..(44): n is a, c, g, or t
  misc_feature (53)..(54): n is a, c, g, or t
tttttttaagcagtggtatcaacgcagagtacnnccggttaanntagtgtgcnntttttttttttttttttttttttttttttt

SEQ ID NO: 2045 - DNA, 84 bp, Artificial
  Barcode component
  misc_feature (33)..(34): n is a, c, g, or t
  misc_feature (43)..(44): n is a, c, g, or t
  misc_feature (53)..(54): n is a, c, g, or t
tttttttaagcagtggtatcaacgcagagtacnnccggttaannctcatgacnntttttttttttttttttttttttttttttt

SEQ ID NO: 2046 - DNA, 84 bp, Artificial
  Barcode component
  misc_feature (33)..(34): n is a, c, g, or t
  misc_feature (43)..(44): n is a, c, g, or t
  misc_feature (53)..(54): n is a, c, g, or t
tttttttaagcagtggtatcaacgcagagtacnnccggttaanngtatccagnntttttttttttttttttttttttttttttt

SEQ ID NO: 2047 - DNA, 84 bp, Artificial
  Barcode component
  misc_feature (33)..(34): n is a, c, g, or t
  misc_feature (43)..(44): n is a, c, g, or t
  misc_feature (53)..(54): n is a, c, g, or t
tttttttaagcagtggtatcaacgcagagtacnnccggttaannacgcctatnntttttttttttttttttttttttttttttt

SEQ ID NO: 2048 - DNA, 84 bp, Artificial
  Barcode component
  misc_feature (33)..(34): n is a, c, g, or t
  misc_feature (43)..(44): n is a, c, g, or t
  misc_feature (53)..(54): n is a, c, g, or t
tttttttaagcagtggtatcaacgcagagtacnnccggttaannaacgacctnntttttttttttttttttttttttttttttt

SEQ ID NO: 2049 - DNA, 84 bp, Artificial
  Barcode component
  misc_feature (33)..(34): n is a, c, g, or t
  misc_feature (43)..(44): n is a, c, g, or t
  misc_feature (53)..(54): n is a, c, g, or t
tttttttaagcagtggtatcaacgcagagtacnnccggttaannatcaggctnntttttttttttttttttttttttttttttt

SEQ ID NO: 2050 - DNA, 84 bp, Artificial
  Barcode component
  misc_feature (33)..(34): n is a, c, g, or t
  misc_feature (43)..(44): n is a, c, g, or t
  misc_feature (53)..(54): n is a, c, g, or t
tttttttaagcagtggtatcaacgcagagtacnnccggttaanncaagttcgnntttttttttttttttttttttttttttttt

SEQ ID NO: 2051 - DNA, 84 bp, Artificial
  Barcode component
  misc_feature (33)..(34): n is a, c, g, or t
  misc_feature (43)..(44): n is a, c, g, or t
  misc_feature (53)..(54): n is a, c, g, or t
tttttttaagcagtggtatcaacgcagagtacnnccggttaanntagccaganntttttttttttttttttttttttttttttt

SEQ ID NO: 2052 - DNA, 84 bp, Artificial
  Barcode component
  misc_feature (33)..(34): n is a, c, g, or t
  misc_feature (43)..(44): n is a, c, g, or t
  misc_feature (53)..(54): n is a, c, g, or t
tttttttaagcagtggtatcaacgcagagtacnnccggttaanncaatcacgnntttttttttttttttttttttttttttttt

SEQ ID NO: 2053 - DNA, 84 bp, Artificial
  Barcode component
  misc_feature (33)..(34): n is a, c, g, or t
  misc_feature (43)..(44): n is a, c, g, or t
  misc_feature (53)..(54): n is a, c, g, or t
tttttttaagcagtggtatcaacgcagagtacnnccggttaanngcaacaagnntttttttttttttttttttttttttttttt

SEQ ID NO: 2054 - DNA, 84 bp, Artificial
  Barcode component
  misc_feature (33)..(34): n is a, c, g, or t
  misc_feature (43)..(44): n is a, c, g, or t
  misc_feature (53)..(54): n is a, c, g, or t
tttttttaagcagtggtatcaacgcagagtacnnccggttaanncacgacaanntttttttttttttttttttttttttttttt

SEQ ID NO: 2055 - DNA, 84 bp, Artificial
  Barcode component
  misc_feature (33)..(34): n is a, c, g, or t
  misc_feature (43)..(44): n is a, c, g, or t
  misc_feature (53)..(54): n is a, c, g, or t
tttttttaagcagtggtatcaacgcagagtacnnccggttaanntacggaganntttttttttttttttttttttttttttttt

SEQ ID NO: 2056 - DNA, 84 bp, Artificial
  Barcode component
  misc_feature (33)..(34): n is a, c, g, or t
  misc_feature (43)..(44): n is a, c, g, or t
  misc_feature (53)..(54): n is a, c, g, or t
tttttttaagcagtggtatcaacgcagagtacnnccggttaanncgacaaganntttttttttttttttttttttttttttttt

SEQ ID NO: 2057 - DNA, 84 bp, Artificial
  Barcode component
  misc_feature (33)..(34): n is a, c, g, or t
  misc_feature (43)..(44): n is a, c, g, or t
  misc_feature (53)..(54): n is a, c, g, or t
tttttttaagcagtggtatcaacgcagagtacnnccggttaanncgaagtganntttttttttttttttttttttttttttttt

SEQ ID NO: 2058 - DNA, 84 bp, Artificial
  Barcode component
  misc_feature (33)..(34): n is a, c, g, or t
  misc_feature (43)..(44): n is a, c, g, or t
  misc_feature (53)..(54): n is a, c, g, or t
tttttttaagcagtggtatcaacgcagagtacnnccggttaannagctggtanntttttttttttttttttttttttttttttt

SEQ ID NO: 2059 - DNA, 84 bp, Artificial
  Barcode component
  misc_feature (33)..(34): n is a, c, g, or t
  misc_feature (43)..(44): n is a, c, g, or t
  misc_feature (53)..(54): n is a, c, g, or t
tttttttaagcagtggtatcaacgcagagtacnnccggttaannaactaggcnntttttttttttttttttttttttttttttt

SEQ ID NO: 2060 - DNA, 84 bp, Artificial
  Barcode component
  misc_feature (33)..(34): n is a, c, g, or t
  misc_feature (43)..(44): n is a, c, g, or t
  misc_feature (53)..(54): n is a, c, g, or t
tttttttaagcagtggtatcaacgcagagtacnnccggttaanncagcaagtnntttttttttttttttttttttttttttttt

SEQ ID NO: 2061 - DNA, 84 bp, Artificial
  Barcode component
  misc_feature (33)..(34): n is a, c, g, or t
  misc_feature (43)..(44): n is a, c, g, or t
  misc_feature (53)..(54): n is a, c, g, or t
tttttttaagcagtggtatcaacgcagagtacnnccggttaannacgaggtanntttttttttttttttttttttttttttttt

SEQ ID NO: 2062 - DNA, 84 bp, Artificial
  Barcode component
  misc_feature (33)..(34): n is a, c, g, or t
  misc_feature (43)..(44): n is a, c, g, or t
  misc_feature (53)..(54): n is a, c, g, or t
tttttttaagcagtggtatcaacgcagagtacnnccggttaanncatcttccnntttttttttttttttttttttttttttttt

SEQ ID NO: 2063 - DNA, 84 bp, Artificial
  Barcode component
  misc_feature (33)..(34): n is a, c, g, or t
  misc_feature (43)..(44): n is a, c, g, or t
  misc_feature (53)..(54): n is a, c, g, or t
tttttttaagcagtggtatcaacgcagagtacnnccggttaanncctgaatcnntttttttttttttttttttttttttttttt

SEQ ID NO: 2064 - DNA, 84 bp, Artificial
  Barcode component
  misc_feature (33)..(34): n is a, c, g, or t
  misc_feature (43)..(44): n is a, c, g, or t
  misc_feature (53)..(54): n is a, c, g, or t
tttttttaagcagtggtatcaacgcagagtacnnccggttaanntgcagactnntttttttttttttttttttttttttttttt

SEQ ID NO: 2065 - DNA, 84 bp, Artificial
  Barcode component
  misc_feature (33)..(34): n is a, c, g, or t
  misc_feature (43)..(44): n is a, c, g, or t
  misc_feature (53)..(54): n is a, c, g, or t
tttttttaagcagtggtatcaacgcagagtacnnccggttaannagatgtggnntttttttttttttttttttttttttttttt

SEQ ID NO: 2066 - DNA, 84 bp, Artificial
  Barcode component
  misc_feature (33)..(34): n is a, c, g, or t
  misc_feature (43)..(44): n is a, c, g, or t
  misc_feature (53)..(54): n is a, c, g, or t
tttttttaagcagtggtatcaacgcagagtacnnccggttaannagttcgacnntttttttttttttttttttttttttttttt

SEQ ID NO: 2067 - DNA, 84 bp, Artificial
  Barcode component
  misc_feature (33)..(34): n is a, c, g, or t
  misc_feature (43)..(44): n is a, c, g, or t
  misc_feature (53)..(54): n is a, c, g, or t
tttttttaagcagtggtatcaacgcagagtacnnccggttaannacaacctcnntttttttttttttttttttttttttttttt

SEQ ID NO: 2068 - DNA, 84 bp, Artificial
  Barcode component
  misc_feature (33)..(34): n is a, c, g, or t
  misc_feature (43)..(44): n is a, c, g, or t
  misc_feature (53)..(54): n is a, c, g, or t
tttttttaagcagtggtatcaacgcagagtacnnccggttaanncatggtagnntttttttttttttttttttttttttttttt

SEQ ID NO: 2069 - DNA, 84 bp, Artificial
  Barcode component
  misc_feature (33)..(34): n is a, c, g, or t
  misc_feature (43)..(44): n is a, c, g, or t
  misc_feature (53)..(54): n is a, c, g, or t
tttttttaagcagtggtatcaacgcagagtacnnccggttaanncgtatctcnntttttttttttttttttttttttttttttt

SEQ ID NO: 2070 - DNA, 84 bp, Artificial
  Barcode component
  misc_feature (33)..(34): n is a, c, g, or t
  misc_feature (43)..(44): n is a, c, g, or t
  misc_feature (53)..(54): n is a, c, g, or t
tttttttaagcagtggtatcaacgcagagtacnnccggttaanncctagttcnntttttttttttttttttttttttttttttt

SEQ ID NO: 2071 - DNA, 84 bp, Artificial
  Barcode component
  misc_feature (33)..(34): n is a, c, g, or t
  misc_feature (43)..(44): n is a, c, g, or t
  misc_feature (53)..(54): n is a, c, g, or t
tttttttaagcagtggtatcaacgcagagtacnnccggttaanncaagagtcnntttttttttttttttttttttttttttttt

SEQ ID NO: 2072 - DNA, 84 bp, Artificial
  Barcode component
  misc_feature (33)..(34): n is a, c, g, or t
  misc_feature (43)..(44): n is a, c, g, or t
  misc_feature (53)..(54): n is a, c, g, or t
tttttttaagcagtggtatcaacgcagagtacnnttgttcggnnaatcggcanntttttttttttttttttttttttttttttt

SEQ ID NO: 2073 - DNA, 84 bp, Artificial
  Barcode component
  misc_feature (33)..(34): n is a, c, g, or t
  misc_feature (43)..(44): n is a, c, g, or t
  misc_feature (53)..(54): n is a, c, g, or t
tttttttaagcagtggtatcaacgcagagtacnnttgttcggnntacggcatnntttttttttttttttttttttttttttttt

SEQ ID NO: 2074 - DNA, 84 bp, Artificial
  Barcode component
  misc_feature (33)..(34): n is a, c, g, or t
  misc_feature (43)..(44): n is a, c, g, or t
  misc_feature (53)..(54): n is a, c, g, or t
tttttttaagcagtggtatcaacgcagagtacnnttgttcggnnttggatcgnntttttttttttttttttttttttttttttt

SEQ ID NO: 2075 - DNA, 84 bp, Artificial
  Barcode component
  misc_feature (33)..(34): n is a, c, g, or t
  misc_feature (43)..(44): n is a, c, g, or t
  misc_feature (53)..(54): n is a, c, g, or t
tttttttaagcagtggtatcaacgcagagtacnnttgttcggnntggaacganntttttttttttttttttttttttttttttt

SEQ ID NO: 2076 - DNA, 84 bp, Artificial
  Barcode component
  misc_feature (33)..(34): n is a, c, g, or t
  misc_feature (43)..(44): n is a, c, g, or t
  misc_feature (53)..(54): n is a, c, g, or t
tttttttaagcagtggtatcaacgcagagtacnnttgttcggnnggcaatcanntttttttttttttttttttttttttttttt

SEQ ID NO: 2077 - DNA, 84 bp, Artificial
  Barcode component
  misc_feature (33)..(34): n is a, c, g, or t
  misc_feature (43)..(44): n is a, c, g, or t
  misc_feature (53)..(54): n is a, c, g, or t
tttttttaagcagtggtatcaacgcagagtacnnttgttcggnngaatccganntttttttttttttttttttttttttttttt

SEQ ID NO: 2078 - DNA, 84 bp, Artificial
  Barcode component
  misc_feature (33)..(34): n is a, c, g, or t
  misc_feature (43)..(44): n is a, c, g, or t
  misc_feature (53)..(54): n is a, c, g, or t
tttttttaagcagtggtatcaacgcagagtacnnttgttcggnnttacggtgnntttttttttttttttttttttttttttttt

SEQ ID NO: 2079 - DNA, 84 bp, Artificial
  Barcode component
  misc_feature (33)..(34): n is a, c, g, or t
  misc_feature (43)..(44): n is a, c, g, or t
  misc_feature (53)..(54): n is a, c, g, or t
tttttttaagcagtggtatcaacgcagagtacnnttgttcggnncatatcggnntttttttttttttttttttttttttttttt

SEQ ID NO: 2080 - DNA, 84 bp, Artificial
  Barcode component
  misc_feature (33)..(34): n is a, c, g, or t
  misc_feature (43)..(44): n is a, c, g, or t
  misc_feature (53)..(54): n is a, c, g, or t
tttttttaagcagtggtatcaacgcagagtacnnttgttcggnncttcggtanntttttttttttttttttttttttttttttt

SEQ ID NO: 2081 - DNA, 84 bp, Artificial
  Barcode component
  misc_feature (33)..(34): n is a, c, g, or t
  misc_feature (43)..(44): n is a, c, g, or t
  misc_feature (53)..(54): n is a, c, g, or t
tttttttaagcagtggtatcaacgcagagtacnnttgttcggnntcctaacgnntttttttttttttttttttttttttttttt

SEQ ID NO: 2082 - DNA, 84 bp, Artificial
  Barcode component
  misc_feature (33)..(34): n is a, c, g, or t
  misc_feature (43)..(44): n is a, c, g, or t
  misc_feature (53)..(54): n is a, c, g, or t
tttttttaagcagtggtatcaacgcagagtacnnttgttcggnngtaagccanntttttttttttttttttttttttttttttt

SEQ ID NO: 2083 - DNA, 84 bp, Artificial
  Barcode component
  misc_feature (33)..(34): n is a, c, g, or t
  misc_feature (43)..(44): n is a, c, g, or t
  misc_feature (53)..(54): n is a, c, g, or t
tttttttaagcagtggtatcaacgcagagtacnnttgttcggnntaaggtggnntttttttttttttttttttttttttttttt

SEQ ID NO: 2084 - DNA, 84 bp, Artificial
  Barcode component
  misc_feature (33)..(34): n is a, c, g, or t
  misc_feature (43)..(44): n is a, c, g, or t
  misc_feature (53)..(54): n is a, c, g, or t
tttttttaagcagtggtatcaacgcagagtacnnttgttcggnnggtaagctnntttttttttttttttttttttttttttttt

SEQ ID NO: 2085 - DNA, 84 bp, Artificial
  Barcode component
  misc_feature (33)..(34): n is a, c, g, or t
  misc_feature (43)..(44): n is a, c, g, or t
  misc_feature (53)..(54): n is a, c, g, or t
tttttttaagcagtggtatcaacgcagagtacnnttgttcggnntgtgtcganntttttttttttttttttttttttttttttt

SEQ ID NO: 2086 - DNA, 84 bp, Artificial
  Barcode component
  misc_feature (33)..(34): n is a, c, g, or t
  misc_feature (43)..(44): n is a, c, g, or t
  misc_feature (53)..(54): n is a, c, g, or t
tttttttaagcagtggtatcaacgcagagtacnnttgttcggnngagcatganntttttttttttttttttttttttttttttt

SEQ ID NO: 2087 - DNA, 84 bp, Artificial
  Barcode component
  misc_feature (33)..(34): n is a, c, g, or t
  misc_feature (43)..(44): n is a, c, g, or t
  misc_feature (53)..(54): n is a, c, g, or t
tttttttaagcagtggtatcaacgcagagtacnnttgttcggnntcgaagtcnntttttttttttttttttttttttttttttt

SEQ ID NO: 2088 - DNA, 84 bp, Artificial
  Barcode component
  misc_feature (33)..(34): n is a, c, g, or t
  misc_feature (43)..(44): n is a, c, g, or t
  misc_feature (53)..(54): n is a, c, g, or t
tttttttaagcagtggtatcaacgcagagtacnnttgttcggnnggtgaacanntttttttttttttttttttttttttttttt

SEQ ID NO: 2089 - DNA, 84 bp, Artificial
  Barcode component
  misc_feature (33)..(34): n is a, c, g, or t
  misc_feature (43)..(44): n is a, c, g, or t
  misc_feature (53)..(54): n is a, c, g, or t
tttttttaagcagtggtatcaacgcagagtacnnttgttcggnnacatgcacnntttttttttttttttttttttttttttttt

SEQ ID NO: 2090 - DNA, 84 bp, Artificial
  Barcode component
  misc_feature (33)..(34): n is a, c, g, or t
  misc_feature (43)..(44): n is a, c, g, or t
  misc_feature (53)..(54): n is a, c, g, or t
tttttttaagcagtggtatcaacgcagagtacnnttgttcggnnccaacagtnntttttttttttttttttttttttttttttt

SEQ ID NO: 2091 - DNA, 84 bp, Artificial
  Barcode component
  misc_feature (33)..(34): n is a, c, g, or t
  misc_feature (43)..(44): n is a, c, g, or t
  misc_feature (53)..(54): n is a, c, g, or t
tttttttaagcagtggtatcaacgcagagtacnnttgttcggnnagaacagcnntttttttttttttttttttttttttttttt

SEQ ID NO: 2092 - DNA, 84 bp, Artificial
  Barcode component
  misc_feature (33)..(34): n is a, c, g, or t
  misc_feature (43)..(44): n is a, c, g, or t
  misc_feature (53)..(54): n is a, c, g, or t
tttttttaagcagtggtatcaacgcagagtacnnttgttcggnngaacacgtnntttttttttttttttttttttttttttttt

SEQ ID NO: 2093 - DNA, 84 bp, Artificial
  Barcode component
  misc_feature (33)..(34): n is a, c, g, or t
  misc_feature (43)..(44): n is a, c, g, or t
  misc_feature (53)..(54): n is a, c, g, or t
tttttttaagcagtggtatcaacgcagagtacnnttgttcggnnggtcttcanntttttttttttttttttttttttttttttt

SEQ ID NO: 2094 - DNA, 84 bp, Artificial
  Barcode component
  misc_feature (33)..(34): n is a, c, g, or t
  misc_feature (43)..(44): n is a, c, g, or t
  misc_feature (53)..(54): n is a, c, g, or t
tttttttaagcagtggtatcaacgcagagtacnnttgttcggnnaggttcagnntttttttttttttttttttttttttttttt

SEQ ID NO: 2095 - DNA, 84 bp, Artificial
  Barcode component
  misc_feature (33)..(34): n is a, c, g, or t
  misc_feature (43)..(44): n is a, c, g, or t
  misc_feature (53)..(54): n is a, c, g, or t
tttttttaagcagtggtatcaacgcagagtacnnttgttcggnnctagagcanntttttttttttttttttttttttttttttt

SEQ ID NO: 2096 - DNA, 84 bp, Artificial
  Barcode component
  misc_feature (33)..(34): n is a, c, g, or t
  misc_feature (43)..(44): n is a, c, g, or t
  misc_feature (53)..(54): n is a, c, g, or t
tttttttaagcagtggtatcaacgcagagtacnnttgttcggnncttctagcnntttttttttttttttttttttttttttttt

SEQ ID NO: 2097 - DNA, 84 bp, Artificial
  Barcode component
  misc_feature (33)..(34): n is a, c, g, or t
  misc_feature (43)..(44): n is a, c, g, or t
  misc_feature (53)..(54): n is a, c, g, or t
tttttttaagcagtggtatcaacgcagagtacnnttgttcggnngagtaacgnntttttttttttttttttttttttttttttt

SEQ ID NO: 2098 - DNA, 84 bp, Artificial
  Barcode component
  misc_feature (33)..(34): n is a, c, g, or t
  misc_feature (43)..(44): n is a, c, g, or t
  misc_feature (53)..(54): n is a, c, g, or t
tttttttaagcagtggtatcaacgcagagtacnnttgttcggnnctaagaggnntttttttttttttttttttttttttttttt

SEQ ID NO: 2099 - DNA, 84 bp, Artificial
  Barcode component
  misc_feature (33)..(34): n is a, c, g, or t
  misc_feature (43)..(44): n is a, c, g, or t
  misc_feature (53)..(54): n is a, c, g, or t
tttttttaagcagtggtatcaacgcagagtacnnttgttcggnnacgtgtagnntttttttttttttttttttttttttttttt

SEQ ID NO: 2100 - DNA, 84 bp, Artificial
  Barcode component
  misc_feature (33)..(34): n is a, c, g, or t
  misc_feature (43)..(44): n is a, c, g, or t
  misc_feature (53)..(54): n is a, c, g, or t
tttttttaagcagtggtatcaacgcagagtacnnttgttcggnnactacaggnntttttttttttttttttttttttttttttt

SEQ ID NO: 2101 - DNA, 84 bp, Artificial
  Barcode component
  misc_feature (33)..(34): n is a, c, g, or t
  misc_feature (43)..(44): n is a, c, g, or t
  misc_feature (53)..(54): n is a, c, g, or t
tttttttaagcagtggtatcaacgcagagtacnnttgttcggnntacaggtcnntttttttttttttttttttttttttttttt

SEQ ID NO: 2102 - DNA, 84 bp, Artificial
  Barcode component
  misc_feature (33)..(34): n is a, c, g, or t
  misc_feature (43)..(44): n is a, c, g, or t
  misc_feature (53)..(54): n is a, c, g, or t
tttttttaagcagtggtatcaacgcagagtacnnttgttcggnnctcacatgnntttttttttttttttttttttttttttttt

SEQ ID NO: 2103 - DNA, 84 bp, Artificial
  Barcode component
  misc_feature (33)..(34): n is a, c, g, or t
  misc_feature (43)..(44): n is a, c, g, or t
  misc_feature (53)..(54): n is a, c, g, or t
tttttttaagcagtggtatcaacgcagagtacnnttgttcggnnactaggagnntttttttttttttttttttttttttttttt

SEQ ID NO: 2104 - DNA, 84 bp, Artificial
  Barcode component
  misc_feature (33)..(34): n is a, c, g, or t
  misc_feature (43)..(44): n is a, c, g, or t
  misc_feature (53)..(54): n is a, c, g, or t
tttttttaagcagtggtatcaacgcagagtacnnttgttcggnnccatagganntttttttttttttttttttttttttttttt

SEQ ID NO: 2105 - DNA, 84 bp, Artificial
  Barcode component
  misc_feature (33)..(34): n is a, c, g, or t
  misc_feature (43)..(44): n is a, c, g, or t
  misc_feature (53)..(54): n is a, c, g, or t
tttttttaagcagtggtatcaacgcagagtacnnttgttcggnnggagaatcnntttttttttttttttttttttttttttttt

SEQ ID NO: 2106 - DNA, 84 bp, Artificial
  Barcode component
  misc_feature (33)..(34): n is a, c, g, or t
  misc_feature (43)..(44): n is a, c, g, or t
  misc_feature (53)..(54): n is a, c, g, or t
tttttttaagcagtggtatcaacgcagagtacnnttgttcggnngccaagaanntttttttttttttttttttttttttttttt

SEQ ID NO: 2107 - DNA, 84 bp, Artificial
  Barcode component
  misc_feature (33)..(34): n is a, c, g, or t
  misc_feature (43)..(44): n is a, c, g, or t
  misc_feature (53)..(54): n is a, c, g, or t
tttttttaagcagtggtatcaacgcagagtacnnttgttcggnnaaggcaagnntttttttttttttttttttttttttttttt

SEQ ID NO: 2108 - DNA, 84 bp, Artificial
  Barcode component
  misc_feature (33)..(34): n is a, c, g, or t
  misc_feature (43)..(44): n is a, c, g, or t
  misc_feature (53)..(54): n is a, c, g, or t
tttttttaagcagtggtatcaacgcagagtacnnttgttcggnnaatgtcgcnntttttttttttttttttttttttttttttt

SEQ ID NO: 2109 - DNA, 84 bp, Artificial
  Barcode component
  misc_feature (33)..(34): n is a, c, g, or t
  misc_feature (43)..(44): n is a, c, g, or t
  misc_feature (53)..(54): n is a, c, g, or t
tttttttaagcagtggtatcaacgcagagtacnnttgttcggnnatggaaccnntttttttttttttttttttttttttttttt

SEQ ID NO: 2110 - DNA, 84 bp, Artificial
  Barcode component
  misc_feature (33)..(34): n is a, c, g, or t
  misc_feature (43)..(44): n is a, c, g, or t
  misc_feature (53)..(54): n is a, c, g, or t
tttttttaagcagtggtatcaacgcagagtacnnttgttcggnnagaggcatnntttttttttttttttttttttttttttttt

SEQ ID NO: 2111 - DNA, 84 bp, Artificial
  Barcode component
  misc_feature (33)..(34): n is a, c, g, or t
  misc_feature (43)..(44): n is a, c, g, or t
  misc_feature (53)..(54): n is a, c, g, or t
tttttttaagcagtggtatcaacgcagagtacnnttgttcggnntgcatagcnntttttttttttttttttttttttttttttt

SEQ ID NO: 2112 - DNA, 84 bp, Artificial
  Barcode component
  misc_feature (33)..(34): n is a, c, g, or t
  misc_feature (43)..(44): n is a, c, g, or t
  misc_feature (53)..(54): n is a, c, g, or t
tttttttaagcagtggtatcaacgcagagtacnnttgttcggnnctaacgganntttttttttttttttttttttttttttttt

SEQ ID NO: 2113 - DNA, 84 bp, Artificial
  Barcode component
  misc_feature (33)..(34): n is a, c, g, or t
  misc_feature (43)..(44): n is a, c, g, or t
  misc_feature (53)..(54): n is a, c, g, or t
tttttttaagcagtggtatcaacgcagagtacnnttgttcggnntatcgaggnntttttttttttttttttttttttttttttt

SEQ ID NO: 2114 - DNA, 84 bp, Artificial
  Barcode component
  misc_feature (33)..(34): n is a, c, g, or t
  misc_feature (43)..(44): n is a, c, g, or t
  misc_feature (53)..(54): n is a, c, g, or t
tttttttaagcagtggtatcaacgcagagtacnnttgttcggnncatagcctnntttttttttttttttttttttttttttttt

SEQ ID NO: 2115 - DNA, 84 bp, Artificial
  Barcode component
  misc_feature (33)..(34): n is a, c, g, or t
  misc_feature (43)..(44): n is a, c, g, or t
  misc_feature (53)..(54): n is a, c, g, or t
tttttttaagcagtggtatcaacgcagagtacnnttgttcggnnatcgagacnntttttttttttttttttttttttttttttt

SEQ ID NO: 2116 - DNA, 84 bp, Artificial
  Barcode component
  misc_feature (33)..(34): n is a, c, g, or t
  misc_feature (43)..(44): n is a, c, g, or t
  misc_feature (53)..(54): n is a, c, g, or t
tttttttaagcagtggtatcaacgcagagtacnnttgttcggnnggaagagtnntttttttttttttttttttttttttttttt

SEQ ID NO: 2117 - DNA, 84 bp, Artificial
  Barcode component
  misc_feature (33)..(34): n is a, c, g, or t
  misc_feature (43)..(44): n is a, c, g, or t
  misc_feature (53)..(54): n is a, c, g, or t
tttttttaagcagtggtatcaacgcagagtacnnttgttcggnnccaagtagnntttttttttttttttttttttttttttttt

SEQ ID NO: 2118 - DNA, 84 bp, Artificial
  Barcode component
  misc_feature (33)..(34): n is a, c, g, or t
  misc_feature (43)..(44): n is a, c, g, or t
  misc_feature (53)..(54): n is a, c, g, or t
tttttttaagcagtggtatcaacgcagagtacnnttgttcggnnctgaacagnntttttttttttttttttttttttttttttt

SEQ ID NO: 2119 - DNA, 84 bp, Artificial
  Barcode component
  misc_feature (33)..(34): n is a, c, g, or t
  misc_feature (43)..(44): n is a, c, g, or t
  misc_feature (53)..(54): n is a, c, g, or t
tttttttaagcagtggtatcaacgcagagtacnnttgttcggnngtaggttcnntttttttttttttttttttttttttttttt

SEQ ID NO: 2120 - DNA, 84 bp, Artificial
  Barcode component
  misc_feature (33)..(34): n is a, c, g, or t
  misc_feature (43)..(44): n is a, c, g, or t
  misc_feature (53)..(54): n is a, c, g, or t
tttttttaagcagtggtatcaacgcagagtacnnttgttcggnngtatggacnntttttttttttttttttttttttttttttt

SEQ ID NO: 2121 - DNA, 84 bp, Artificial
  Barcode component
  misc_feature (33)..(34): n is a, c, g, or t
  misc_feature (43)..(44): n is a, c, g, or t
  misc_feature (53)..(54): n is a, c, g, or t
tttttttaagcagtggtatcaacgcagagtacnnttgttcggnntcgcaacanntttttttttttttttttttttttttttttt

SEQ ID NO: 2122 - DNA, 84 bp, Artificial
  Barcode component
  misc_feature (33)..(34): n is a, c, g, or t
  misc_feature (43)..(44): n is a, c, g, or t
  misc_feature (53)..(54): n is a, c, g, or t
tttttttaagcagtggtatcaacgcagagtacnnttgttcggnnccgctaatnntttttttttttttttttttttttttttttt

SEQ ID NO: 2123 - DNA, 84 bp, Artificial
  Barcode component
  misc_feature (33)..(34): n is a, c, g, or t
  misc_feature (43)..(44): n is a, c, g, or t
  misc_feature (53)..(54): n is a, c, g, or t
tttttttaagcagtggtatcaacgcagagtacnnttgttcggnngattcgcanntttttttttttttttttttttttttttttt

SEQ ID NO: 2124 - DNA, 84 bp, Artificial
  Barcode component
  misc_feature (33)..(34): n is a, c, g, or t
  misc_feature (43)..(44): n is a, c, g, or t
  misc_feature (53)..(54): n is a, c, g, or t
tttttttaagcagtggtatcaacgcagagtacnnttgttcggnncgatggaanntttttttttttttttttttttttttttttt

SEQ ID NO: 2125 - DNA, 84 bp, Artificial
  Barcode component
  misc_feature (33)..(34): n is a, c, g, or t
  misc_feature (43)..(44): n is a, c, g, or t
  misc_feature (53)..(54): n is a, c, g, or t
tttttttaagcagtggtatcaacgcagagtacnnttgttcggnnagcaagganntttttttttttttttttttttttttttttt

SEQ ID NO: 2126 - DNA, 84 bp, Artificial
  Barcode component
  misc_feature (33)..(34): n is a, c, g, or t
  misc_feature (43)..(44): n is a, c, g, or t
  misc_feature (53)..(54): n is a, c, g, or t
tttttttaagcagtggtatcaacgcagagtacnnttgttcggnncgtagcaanntttttttttttttttttttttttttttttt

SEQ ID NO: 2127 - DNA, 84 bp, Artificial
  Barcode component
  misc_feature (33)..(34): n is a, c, g, or t
  misc_feature (43)..(44): n is a, c, g, or t
  misc_feature (53)..(54): n is a, c, g, or t
tttttttaagcagtggtatcaacgcagagtacnnttgttcggnntggcagtanntttttttttttttttttttttttttttttt

SEQ ID NO: 2128 - DNA, 84 bp, Artificial
  Barcode component
  misc_feature (33)..(34): n is a, c, g, or t
  misc_feature (43)..(44): n is a, c, g, or t
  misc_feature (53)..(54): n is a, c, g, or t
tttttttaagcagtggtatcaacgcagagtacnnttgttcggnncggtagttnntttttttttttttttttttttttttttttt

SEQ ID NO: 2129 - DNA, 84 bp, Artificial
  Barcode component
  misc_feature (33)..(34): n is a, c, g, or t
  misc_feature (43)..(44): n is a, c, g, or t
  misc_feature (53)..(54): n is a, c, g, or t
tttttttaagcagtggtatcaacgcagagtacnnttgttcggnntgacttcgnntttttttttttttttttttttttttttttt

SEQ ID NO: 2130 - DNA, 84 bp, Artificial
  Barcode component
  misc_feature (33)..(34): n is a, c, g, or t
  misc_feature (43)..(44): n is a, c, g, or t
  misc_feature (53)..(54): n is a, c, g, or t
tttttttaagcagtggtatcaacgcagagtacnnttgttcggnngagtgcaanntttttttttttttttttttttttttttttt

SEQ ID NO: 2131 - DNA, 84 bp, Artificial
  Barcode component
  misc_feature (33)..(34): n is a, c, g, or t
  misc_feature (43)..(44): n is a, c, g, or t
  misc_feature (53)..(54): n is a, c, g, or t
tttttttaagcagtggtatcaacgcagagtacnnttgttcggnnacggtaacnntttttttttttttttttttttttttttttt

SEQ ID NO: 2132 - DNA, 84 bp, Artificial
  Barcode component
  misc_feature (33)..(34): n is a, c, g, or t
  misc_feature (43)..(44): n is a, c, g, or t
  misc_feature (53)..(54): n is a, c, g, or t
tttttttaagcagtggtatcaacgcagagtacnnttgttcggnnaagtggtgnntttttttttttttttttttttttttttttt

SEQ ID NO: 2133 - DNA, 84 bp, Artificial
  Barcode component
  misc_feature (33)..(34): n is a, c, g, or t
  misc_feature (43)..(44): n is a, c, g, or t
  misc_feature (53)..(54): n is a, c, g, or t
tttttttaagcagtggtatcaacgcagagtacnnttgttcggnnggagacaanntttttttttttttttttttttttttttttt

SEQ ID NO: 2134 - DNA, 84 bp, Artificial
  Barcode component
  misc_feature (33)..(34): n is a, c, g, or t
  misc_feature (43)..(44): n is a, c, g, or t
  misc_feature (53)..(54): n is a, c, g, or t
tttttttaagcagtggtatcaacgcagagtacnnttgttcggnntcaaggacnntttttttttttttttttttttttttttttt

SEQ ID NO: 2135 - DNA, 84 bp, Artificial
  Barcode component
  misc_feature (33)..(34): n is a, c, g, or t
  misc_feature (43)..(44): n is a, c, g, or t
  misc_feature (53)..(54): n is a, c, g, or t
tttttttaagcagtggtatcaacgcagagtacnnttgttcggnnaagagagcnntttttttttttttttttttttttttttttt

SEQ ID NO: 2136 - DNA, 84 bp, Artificial
  Barcode component
  misc_feature (33)..(34): n is a, c, g, or t
  misc_feature (43)..(44): n is a, c, g, or t
  misc_feature (53)..(54): n is a, c, g, or t
tttttttaagcagtggtatcaacgcagagtacnnttgttcggnncgagagatnntttttttttttttttttttttttttttttt

SEQ ID NO: 2137 - DNA, 84 bp, Artificial
  Barcode component
  misc_feature (33)..(34): n is a, c, g, or t
  misc_feature (43)..(44): n is a, c, g, or t
  misc_feature (53)..(54): n is a, c, g, or t
tttttttaagcagtggtatcaacgcagagtacnnttgttcggnnacagatggnntttttttttttttttttttttttttttttt

SEQ ID NO: 2138 - DNA, 84 bp, Artificial
  Barcode component
  misc_feature (33)..(34): n is a, c, g, or t
  misc_feature (43)..(44): n is a, c, g, or t
  misc_feature (53)..(54): n is a, c, g, or t
tttttttaagcagtggtatcaacgcagagtacnnttgttcggnnaggagtcanntttttttttttttttttttttttttttttt

SEQ ID NO: 2139 - DNA, 84 bp, Artificial
  Barcode component
  misc_feature (33)..(34): n is a, c, g, or t
  misc_feature (43)..(44): n is a, c, g, or t
  misc_feature (53)..(54): n is a, c, g, or t
tttttttaagcagtggtatcaacgcagagtacnnttgttcggnncgtgttacnntttttttttttttttttttttttttttttt

SEQ ID NO: 2140 - DNA, 84 bp, Artificial
  Barcode component
  misc_feature (33)..(34): n is a, c, g, or t
  misc_feature (43)..(44): n is a, c, g, or t
  misc_feature (53)..(54): n is a, c, g, or t
tttttttaagcagtggtatcaacgcagagtacnnttgttcggnntagtgtgcnntttttttttttttttttttttttttttttt

SEQ ID NO: 2141 - DNA, 84 bp, Artificial
  Barcode component
  misc_feature (33)..(34): n is a, c, g, or t
  misc_feature (43)..(44): n is a, c, g, or t
  misc_feature (53)..(54): n is a, c, g, or t
tttttttaagcagtggtatcaacgcagagtacnnttgttcggnnctcatgacnntttttttttttttttttttttttttttttt

SEQ ID NO: 2142 - DNA, 84 bp, Artificial
  Barcode component
  misc_feature (33)..(34): n is a, c, g, or t
  misc_feature (43)..(44): n is a, c, g, or t
  misc_feature (53)..(54): n is a, c, g, or t
tttttttaagcagtggtatcaacgcagagtacnnttgttcggnngtatccagnntttttttttttttttttttttttttttttt

SEQ ID NO: 2143 - DNA, 84 bp, Artificial
  Barcode component
  misc_feature (33)..(34): n is a, c, g, or t
  misc_feature (43)..(44): n is a, c, g, or t
  misc_feature (53)..(54): n is a, c, g, or t
tttttttaagcagtggtatcaacgcagagtacnnttgttcggnnacgcctatnntttttttttttttttttttttttttttttt

SEQ ID NO: 2144 - DNA, 84 bp, Artificial
  Barcode component
  misc_feature (33)..(34): n is a, c, g, or t
  misc_feature (43)..(44): n is a, c, g, or t
  misc_feature (53)..(54): n is a, c, g, or t
tttttttaagcagtggtatcaacgcagagtacnnttgttcggnnaacgacctnntttttttttttttttttttttttttttttt

SEQ ID NO: 2145 - DNA, 84 bp, Artificial
  Barcode component
  misc_feature (33)..(34): n is a, c, g, or t
  misc_feature (43)..(44): n is a, c, g, or t
  misc_feature (53)..(54): n is a, c, g, or t
tttttttaagcagtggtatcaacgcagagtacnnttgttcggnnatcaggctnntttttttttttttttttttttttttttttt

SEQ ID NO: 2146 - DNA, 84 bp, Artificial
  Barcode component
  misc_feature (33)..(34): n is a, c, g, or t
  misc_feature (43)..(44): n is a, c, g, or t
  misc_feature (53)..(54): n is a, c, g, or t
tttttttaagcagtggtatcaacgcagagtacnnttgttcggnncaagttcgnntttttttttttttttttttttttttttttt

SEQ ID NO: 2147 - DNA, 84 bp, Artificial
  Barcode component
  misc_feature (33)..(34): n is a, c, g, or t
  misc_feature (43)..(44): n is a, c, g, or t
  misc_feature (53)..(54): n is a, c, g, or t
tttttttaagcagtggtatcaacgcagagtacnnttgttcggnntagccaganntttttttttttttttttttttttttttttt

SEQ ID NO: 2148 - DNA, 84 bp, Artificial
  Barcode component
  misc_feature (33)..(34): n is a, c, g, or t
  misc_feature (43)..(44): n is a, c, g, or t
  misc_feature (53)..(54): n is a, c, g, or t
tttttttaagcagtggtatcaacgcagagtacnnttgttcggnncaatcacgnntttttttttttttttttttttttttttttt

SEQ ID NO: 2149 - DNA, 84 bp, Artificial
  Barcode component
  misc_feature (33)..(34): n is a, c, g, or t
  misc_feature (43)..(44): n is a, c, g, or t
  misc_feature (53)..(54): n is a, c, g, or t
tttttttaagcagtggtatcaacgcagagtacnnttgttcggnngcaacaagnntttttttttttttttttttttttttttttt

SEQ ID NO: 2150 - DNA, 84 bp, Artificial
  Barcode component
  misc_feature (33)..(34): n is a, c, g, or t
  misc_feature (43)..(44): n is a, c, g, or t
  misc_feature (53)..(54): n is a, c, g, or t
tttttttaagcagtggtatcaacgcagagtacnnttgttcggnncacgacaanntttttttttttttttttttttttttttttt

SEQ ID NO: 2151 - DNA, 84 bp, Artificial
  Barcode component
  misc_feature (33)..(34): n is a, c, g, or t
  misc_feature (43)..(44): n is a, c, g, or t
  misc_feature (53)..(54): n is a, c, g, or t
tttttttaagcagtggtatcaacgcagagtacnnttgttcggnntacggaganntttttttttttttttttttttttttttttt

SEQ ID NO: 2152 - DNA, 84 bp, Artificial
  Barcode component
  misc_feature (33)..(34): n is a, c, g, or t
  misc_feature (43)..(44): n is a, c, g, or t
  misc_feature (53)..(54): n is a, c, g, or t
tttttttaagcagtggtatcaacgcagagtacnnttgttcggnncgacaaganntttttttttttttttttttttttttttttt

SEQ ID NO: 2153 - DNA, 84 bp, Artificial
  Barcode component
  misc_feature (33)..(34): n is a, c, g, or t
  misc_feature (43)..(44): n is a, c, g, or t
  misc_feature (53)..(54): n is a, c, g, or t
tttttttaagcagtggtatcaacgcagagtacnnttgttcggnncgaagtganntttttttttttttttttttttttttttttt

SEQ ID NO: 2154 - DNA, 84 bp, Artificial
  Barcode component
  misc_feature (33)..(34): n is a, c, g, or t
  misc_feature (43)..(44): n is a, c, g, or t
  misc_feature (53)..(54): n is a, c, g, or t
tttttttaagcagtggtatcaacgcagagtacnnttgttcggnnagctggtanntttttttttttttttttttttttttttttt

SEQ ID NO: 2155 - DNA, 84 bp, Artificial
  Barcode component
  misc_feature (33)..(34): n is a, c, g, or t
  misc_feature (43)..(44): n is a, c, g, or t
  misc_feature (53)..(54): n is a, c, g, or t
tttttttaagcagtggtatcaacgcagagtacnnttgttcggnnaactaggcnntttttttttttttttttttttttttttttt

SEQ ID NO: 2156 - DNA, 84 bp, Artificial
  Barcode component
  misc_feature (33)..(34): n is a, c, g, or t
  misc_feature (43)..(44): n is a, c, g, or t
  misc_feature (53)..(54): n is a, c, g, or t
tttttttaagcagtggtatcaacgcagagtacnnttgttcggnncagcaagtnntttttttttttttttttttttttttttttt

SEQ ID NO: 2157 - DNA, 84 bp, Artificial
  Barcode component
  misc_feature (33)..(34): n is a, c, g, or t
  misc_feature (43)..(44): n is a, c, g, or t
  misc_feature (53)..(54): n is a, c, g, or t
tttttttaagcagtggtatcaacgcagagtacnnttgttcggnnacgaggtanntttttttttttttttttttttttttttttt

SEQ ID NO: 2158 - DNA, 84 bp, Artificial
  Barcode component
  misc_feature (33)..(34): n is a, c, g, or t
  misc_feature (43)..(44): n is a, c, g, or t
  misc_feature (53)..(54): n is a, c, g, or t
tttttttaagcagtggtatcaacgcagagtacnnttgttcggnncatcttccnntttttttttttttttttttttttttttttt

SEQ ID NO: 2159 - DNA, 84 bp, Artificial
  Barcode component
  misc_feature (33)..(34): n is a, c, g, or t
  misc_feature (43)..(44): n is a, c, g, or t
  misc_feature (53)..(54): n is a, c, g, or t
tttttttaagcagtggtatcaacgcagagtacnnttgttcggnncctgaatcnntttttttttttttttttttttttttttttt

SEQ ID NO: 2160 - DNA, 84 bp, Artificial
  Barcode component
  misc_feature (33)..(34): n is a, c, g, or t
  misc_feature (43)..(44): n is a, c, g, or t
  misc_feature (53)..(54): n is a, c, g, or t
tttttttaagcagtggtatcaacgcagagtacnnttgttcggnntgcagactnntttttttttttttttttttttttttttttt

SEQ ID NO: 2161 - DNA, 84 bp, Artificial
  Barcode component
  misc_feature (33)..(34): n is a, c, g, or t
  misc_feature (43)..(44): n is a, c, g, or t
  misc_feature (53)..(54): n is a, c, g, or t
tttttttaagcagtggtatcaacgcagagtacnnttgttcggnnagatgtggnntttttttttttttttttttttttttttttt

SEQ ID NO: 2162 - DNA, 84 bp, Artificial
  Barcode component
  misc_feature (33)..(34): n is a, c, g, or t
  misc_feature (43)..(44): n is a, c, g, or t
  misc_feature (53)..(54): n is a, c, g, or t
tttttttaagcagtggtatcaacgcagagtacnnttgttcggnnagttcgacnntttttttttttttttttttttttttttttt

SEQ ID NO: 2163 - DNA, 84 bp, Artificial
  Barcode component
  misc_feature (33)..(34): n is a, c, g, or t
  misc_feature (43)..(44): n is a, c, g, or t
  misc_feature (53)..(54): n is a, c, g, or t
tttttttaagcagtggtatcaacgcagagtacnnttgttcggnnacaacctcnntttttttttttttttttttttttttttttt

SEQ ID NO: 2164 - DNA, 84 bp, Artificial
  Barcode component
  misc_feature (33)..(34): n is a, c, g, or t
  misc_feature (43)..(44): n is a, c, g, or t
  misc_feature (53)..(54): n is a, c, g, or t
tttttttaagcagtggtatcaacgcagagtacnnttgttcggnncatggtagnntttttttttttttttttttttttttttttt

SEQ ID NO: 2165 - DNA, 84 bp, Artificial
  Barcode component
  misc_feature (33)..(34): n is a, c, g, or t
  misc_feature (43)..(44): n is a, c, g, or t
  misc_feature (53)..(54): n is a, c, g, or t
tttttttaagcagtggtatcaacgcagagtacnnttgttcggnncgtatctcnntttttttttttttttttttttttttttttt

SEQ ID NO: 2166 - DNA, 84 bp, Artificial
  Barcode component
  misc_feature (33)..(34): n is a, c, g, or t
  misc_feature (43)..(44): n is a, c, g, or t
  misc_feature (53)..(54): n is a, c, g, or t
tttttttaagcagtggtatcaacgcagagtacnnttgttcggnncctagttcnntttttttttttttttttttttttttttttt

SEQ ID NO: 2167 - DNA, 84 bp, Artificial
  Barcode component
  misc_feature (33)..(34): n is a, c, g, or t
  misc_feature (43)..(44): n is a, c, g, or t
  misc_feature (53)..(54): n is a, c, g, or t
tttttttaagcagtggtatcaacgcagagtacnnttgttcggnncaagagtcnntttttttttttttttttttttttttttttt

SEQ ID NO: 2168 - DNA, 84 bp, Artificial
  Barcode component
  misc_feature (33)..(34): n is a, c, g, or t
  misc_feature (43)..(44): n is a, c, g, or t
  misc_feature (53)..(54): n is a, c, g, or t
tttttttaagcagtggtatcaacgcagagtacnngatcttggnnaatcggcanntttttttttttttttttttttttttttttt

SEQ ID NO: 2169 - DNA, 84 bp, Artificial
  Barcode component
  misc_feature (33)..(34): n is a, c, g, or t
  misc_feature (43)..(44): n is a, c, g, or t
  misc_feature (53)..(54): n is a, c, g, or t
tttttttaagcagtggtatcaacgcagagtacnngatcttggnntacggcatnntttttttttttttttttttttttttttttt

SEQ ID NO: 2170 - DNA, 84 bp, Artificial
  Barcode component
  misc_feature (33)..(34): n is a, c, g, or t
  misc_feature (43)..(44): n is a, c, g, or t
  misc_feature (53)..(54): n is a, c, g, or t
tttttttaagcagtggtatcaacgcagagtacnngatcttggnnttggatcgnntttttttttttttttttttttttttttttt

SEQ ID NO: 2171 - DNA, 84 bp, Artificial
  Barcode component
  misc_feature (33)..(34): n is a, c, g, or t
  misc_feature (43)..(44): n is a, c, g, or t
  misc_feature (53)..(54): n is a, c, g, or t
tttttttaagcagtggtatcaacgcagagtacnngatcttggnntggaacganntttttttttttttttttttttttttttttt

SEQ ID NO: 2172 - DNA, 84 bp, Artificial
  Barcode component
  misc_feature (33)..(34): n is a, c, g, or t
  misc_feature (43)..(44): n is a, c, g, or t
  misc_feature (53)..(54): n is a, c, g, or t
tttttttaagcagtggtatcaacgcagagtacnngatcttggnnggcaatcanntttttttttttttttttttttttttttttt

SEQ ID NO: 2173 - DNA, 84 bp, Artificial
  Barcode component
  misc_feature (33)..(34): n is a, c, g, or t
  misc_feature (43)..(44): n is a, c, g, or t
  misc_feature (53)..(54): n is a, c, g, or t
tttttttaagcagtggtatcaacgcagagtacnngatcttggnngaatccganntttttttttttttttttttttttttttttt

SEQ ID NO: 2174 - DNA, 84 bp, Artificial
  Barcode component
  misc_feature (33)..(34): n is a, c, g, or t
  misc_feature (43)..(44): n is a, c, g, or t
  misc_feature (53)..(54): n is a, c, g, or t
tttttttaagcagtggtatcaacgcagagtacnngatcttggnnttacggtgnntttttttttttttttttttttttttttttt

SEQ ID NO: 2175 - DNA, 84 bp, Artificial
  Barcode component
  misc_feature (33)..(34): n is a, c, g, or t
  misc_feature (43)..(44): n is a, c, g, or t
  misc_feature (53)..(54): n is a, c, g, or t
tttttttaagcagtggtatcaacgcagagtacnngatcttggnncatatcggnntttttttttttttttttttttttttttttt

SEQ ID NO: 2176 - DNA, 84 bp, Artificial
  Barcode component
  misc_feature (33)..(34): n is a, c, g, or t
  misc_feature (43)..(44): n is a, c, g, or t
  misc_feature (53)..(54): n is a, c, g, or t
tttttttaagcagtggtatcaacgcagagtacnngatcttggnncttcggtanntttttttttttttttttttttttttttttt

SEQ ID NO: 2177 - DNA, 84 bp, Artificial
  Barcode component
  misc_feature (33)..(34): n is a, c, g, or t
  misc_feature (43)..(44): n is a, c, g, or t
  misc_feature (53)..(54): n is a, c, g, or t
tttttttaagcagtggtatcaacgcagagtacnngatcttggnntcctaacgnntttttttttttttttttttttttttttttt

SEQ ID NO: 2178 - DNA, 84 bp, Artificial
  Barcode component
  misc_feature (33)..(34): n is a, c, g, or t
  misc_feature (43)..(44): n is a, c, g, or t
  misc_feature (53)..(54): n is a, c, g, or t
tttttttaagcagtggtatcaacgcagagtacnngatcttggnngtaagccanntttttttttttttttttttttttttttttt

SEQ ID NO: 2179 - DNA, 84 bp, Artificial
  Barcode component
  misc_feature (33)..(34): n is a, c, g, or t
  misc_feature (43)..(44): n is a, c, g, or t
  misc_feature (53)..(54): n is a, c, g, or t
tttttttaagcagtggtatcaacgcagagtacnngatcttggnntaaggtggnntttttttttttttttttttttttttttttt

SEQ ID NO: 2180 - DNA, 84 bp, Artificial
  Barcode component
  misc_feature (33)..(34): n is a, c, g, or t
  misc_feature (43)..(44): n is a, c, g, or t
  misc_feature (53)..(54): n is a, c, g, or t
tttttttaagcagtggtatcaacgcagagtacnngatcttggnnggtaagctnntttttttttttttttttttttttttttttt

SEQ ID NO: 2181 - DNA, 84 bp, Artificial
  Barcode component
  misc_feature (33)..(34): n is a, c, g, or t
  misc_feature (43)..(44): n is a, c, g, or t
  misc_feature (53)..(54): n is a, c, g, or t
tttttttaagcagtggtatcaacgcagagtacnngatcttggnntgtgtcganntttttttttttttttttttttttttttttt

SEQ ID NO: 2182 - DNA, 84 bp, Artificial
  Barcode component
  misc_feature (33)..(34): n is a, c, g, or t
  misc_feature (43)..(44): n is a, c, g, or t
  misc_feature (53)..(54): n is a, c, g, or t
tttttttaagcagtggtatcaacgcagagtacnngatcttggnngagcatganntttttttttttttttttttttttttttttt

SEQ ID NO: 2183 - DNA, 84 bp, Artificial
  Barcode component
  misc_feature (33)..(34): n is a, c, g, or t
  misc_feature (43)..(44): n is a, c, g, or t
  misc_feature (53)..(54): n is a, c, g, or t
tttttttaagcagtggtatcaacgcagagtacnngatcttggnntcgaagtcnntttttttttttttttttttttttttttttt

SEQ ID NO: 2184 - DNA, 84 bp, Artificial
  Barcode component
  misc_feature (33)..(34): n is a, c, g, or t
  misc_feature (43)..(44): n is a, c, g, or t
  misc_feature (53)..(54): n is a, c, g, or t
tttttttaagcagtggtatcaacgcagagtacnngatcttggnnggtgaacanntttttttttttttttttttttttttttttt

SEQ ID NO: 2185 - DNA, 84 bp, Artificial
  Barcode component
  misc_feature (33)..(34): n is a, c, g, or t
  misc_feature (43)..(44): n is a, c, g, or t
  misc_feature (53)..(54): n is a, c, g, or t
tttttttaagcagtggtatcaacgcagagtacnngatcttggnnacatgcacnntttttttttttttttttttttttttttttt

SEQ ID NO: 2186 - DNA, 84 bp, Artificial
  Barcode component
  misc_feature (33)..(34): n is a, c, g, or t
  misc_feature (43)..(44): n is a, c, g, or t
  misc_feature (53)..(54): n is a, c, g, or t
tttttttaagcagtggtatcaacgcagagtacnngatcttggnnccaacagtnntttttttttttttttttttttttttttttt

SEQ ID NO: 2187 - DNA, 84 bp, Artificial
  Barcode component
  misc_feature (33)..(34): n is a, c, g, or t
  misc_feature (43)..(44): n is a, c, g, or t
  misc_feature (53)..(54): n is a, c, g, or t
tttttttaagcagtggtatcaacgcagagtacnngatcttggnnagaacagcnntttttttttttttttttttttttttttttt

SEQ ID NO: 2188 - DNA, 84 bp, Artificial
  Barcode component
  misc_feature (33)..(34): n is a, c, g, or t
  misc_feature (43)..(44): n is a, c, g, or t
  misc_feature (53)..(54): n is a, c, g, or t
tttttttaagcagtggtatcaacgcagagtacnngatcttggnngaacacgtnntttttttttttttttttttttttttttttt

SEQ ID NO: 2189 - DNA, 84 bp, Artificial
  Barcode component
  misc_feature (33)..(34): n is a, c, g, or t
  misc_feature (43)..(44): n is a, c, g, or t
  misc_feature (53)..(54): n is a, c, g, or t
tttttttaagcagtggtatcaacgcagagtacnngatcttggnnggtcttcanntttttttttttttttttttttttttttttt

SEQ ID NO: 2190 - DNA, 84 bp, Artificial
  Barcode component
  misc_feature (33)..(34): n is a, c, g, or t
  misc_feature (43)..(44): n is a, c, g, or t
  misc_feature (53)..(54): n is a, c, g, or t
tttttttaagcagtggtatcaacgcagagtacnngatcttggnnaggttcagnntttttttttttttttttttttttttttttt

SEQ ID NO: 2191 - DNA, 84 bp, Artificial
  Barcode component
  misc_feature (33)..(34): n is a, c, g, or t
  misc_feature (43)..(44): n is a, c, g, or t
  misc_feature (53)..(54): n is a, c, g, or t
tttttttaagcagtggtatcaacgcagagtacnngatcttggnnctagagcanntttttttttttttttttttttttttttttt

SEQ ID NO: 2192 - DNA, 84 bp, Artificial
  Barcode component
  misc_feature (33)..(34): n is a, c, g, or t
  misc_feature (43)..(44): n is a, c, g, or t
  misc_feature (53)..(54): n is a, c, g, or t
tttttttaagcagtggtatcaacgcagagtacnngatcttggnncttctagcnntttttttttttttttttttttttttttttt

SEQ ID NO: 2193 - DNA, 84 bp, Artificial
  Barcode component
  misc_feature (33)..(34): n is a, c, g, or t
  misc_feature (43)..(44): n is a, c, g, or t
  misc_feature (53)..(54): n is a, c, g, or t
tttttttaagcagtggtatcaacgcagagtacnngatcttggnngagtaacgnntttttttttttttttttttttttttttttt

SEQ ID NO: 2194 - DNA, 84 bp, Artificial
  Barcode component
  misc_feature (33)..(34): n is a, c, g, or t
  misc_feature (43)..(44): n is a, c, g, or t
  misc_feature (53)..(54): n is a, c, g, or t
tttttttaagcagtggtatcaacgcagagtacnngatcttggnnctaagaggnntttttttttttttttttttttttttttttt

SEQ ID NO: 2195 - DNA, 84 bp, Artificial
  Barcode component
  misc_feature (33)..(34): n is a, c, g, or t
  misc_feature (43)..(44): n is a, c, g, or t
  misc_feature (53)..(54): n is a, c, g, or t
tttttttaagcagtggtatcaacgcagagtacnngatcttggnnacgtgtagnntttttttttttttttttttttttttttttt

SEQ ID NO: 2196 - DNA, 84 bp, Artificial
  Barcode component
  misc_feature (33)..(34): n is a, c, g, or t
  misc_feature (43)..(44): n is a, c, g, or t
  misc_feature (53)..(54): n is a, c, g, or t
tttttttaagcagtggtatcaacgcagagtacnngatcttggnnactacaggnntttttttttttttttttttttttttttttt

SEQ ID NO: 2197 - DNA, 84 bp, Artificial
  Barcode component
  misc_feature (33)..(34): n is a, c, g, or t
  misc_feature (43)..(44): n is a, c, g, or t
  misc_feature (53)..(54): n is a, c, g, or t
tttttttaagcagtggtatcaacgcagagtacnngatcttggnntacaggtcnntttttttttttttttttttttttttttttt

SEQ ID NO: 2198 - DNA, 84 bp, Artificial
  Barcode component
  misc_feature (33)..(34): n is a, c, g, or t
  misc_feature (43)..(44): n is a, c, g, or t
  misc_feature (53)..(54): n is a, c, g, or t
tttttttaagcagtggtatcaacgcagagtacnngatcttggnnctcacatgnntttttttttttttttttttttttttttttt

SEQ ID NO: 2199 - DNA, 84 bp, Artificial
  Barcode component
  misc_feature (33)..(34): n is a, c, g, or t
  misc_feature (43)..(44): n is a, c, g, or t
  misc_feature (53)..(54): n is a, c, g, or t
tttttttaagcagtggtatcaacgcagagtacnngatcttggnnactaggagnntttttttttttttttttttttttttttttt

SEQ ID NO: 2200 - DNA, 84 bp, Artificial
  Barcode component
  misc_feature (33)..(34): n is a, c, g, or t
  misc_feature (43)..(44): n is a, c, g, or t
  misc_feature (53)..(54): n is a, c, g, or t
tttttttaagcagtggtatcaacgcagagtacnngatcttggnnccatagganntttttttttttttttttttttttttttttt

SEQ ID NO: 2201 - DNA, 84 bp, Artificial
  Barcode component
  misc_feature (33)..(34): n is a, c, g, or t
  misc_feature (43)..(44): n is a, c, g, or t
  misc_feature (53)..(54): n is a, c, g, or t
tttttttaagcagtggtatcaacgcagagtacnngatcttggnnggagaatcnntttttttttttttttttttttttttttttt

SEQ ID NO: 2202 - DNA, 84 bp, Artificial
  Barcode component
  misc_feature (33)..(34): n is a, c, g, or t
  misc_feature (43)..(44): n is a, c, g, or t
  misc_feature (53)..(54): n is a, c, g, or t
tttttttaagcagtggtatcaacgcagagtacnngatcttggnngccaagaanntttttttttttttttttttttttttttttt

SEQ ID NO: 2203 - DNA, 84 bp, Artificial
  Barcode component
  misc_feature (33)..(34): n is a, c, g, or t
  misc_feature (43)..(44): n is a, c, g, or t
  misc_feature (53)..(54): n is a, c, g, or t
tttttttaagcagtggtatcaacgcagagtacnngatcttggnnaaggcaagnntttttttttttttttttttttttttttttt

SEQ ID NO: 2204 - DNA, 84 bp, Artificial
  Barcode component
  misc_feature (33)..(34): n is a, c, g, or t
  misc_feature (43)..(44): n is a, c, g, or t
  misc_feature (53)..(54): n is a, c, g, or t
tttttttaagcagtggtatcaacgcagagtacnngatcttggnnaatgtcgcnntttttttttttttttttttttttttttttt

SEQ ID NO: 2205 - DNA, 84 bp, Artificial
  Barcode component
  misc_feature (33)..(34): n is a, c, g, or t
  misc_feature (43)..(44): n is a, c, g, or t
  misc_feature (53)..(54): n is a, c, g, or t
tttttttaagcagtggtatcaacgcagagtacnngatcttggnnatggaaccnntttttttttttttttttttttttttttttt

SEQ ID NO: 2206 - DNA, 84 bp, Artificial
  Barcode component
  misc_feature (33)..(34): n is a, c, g, or t
  misc_feature (43)..(44): n is a, c, g, or t
  misc_feature (53)..(54): n is a, c, g, or t
tttttttaagcagtggtatcaacgcagagtacnngatcttggnnagaggcatnntttttttttttttttttttttttttttttt

SEQ ID NO: 2207 - DNA, 84 bp, Artificial
  Barcode component
  misc_feature (33)..(34): n is a, c, g, or t
  misc_feature (43)..(44): n is a, c, g, or t
  misc_feature (53)..(54): n is a, c, g, or t
tttttttaagcagtggtatcaacgcagagtacnngatcttggnntgcatagcnntttttttttttttttttttttttttttttt

SEQ ID NO: 2208 - DNA, 84 bp, Artificial
  Barcode component
  misc_feature (33)..(34): n is a, c, g, or t
  misc_feature (43)..(44): n is a, c, g, or t
  misc_feature (53)..(54): n is a, c, g, or t
tttttttaagcagtggtatcaacgcagagtacnngatcttggnnctaacgganntttttttttttttttttttttttttttttt

SEQ ID NO: 2209 - DNA, 84 bp, Artificial
  Barcode component
  misc_feature (33)..(34): n is a, c, g, or t
  misc_feature (43)..(44): n is a, c, g, or t
  misc_feature (53)..(54): n is a, c, g, or t
tttttttaagcagtggtatcaacgcagagtacnngatcttggnntatcgaggnntttttttttttttttttttttttttttttt

SEQ ID NO: 2210 - DNA, 84 bp, Artificial
  Barcode component
  misc_feature (33)..(34): n is a, c, g, or t
  misc_feature (43)..(44): n is a, c, g, or t
  misc_feature (53)..(54): n is a, c, g, or t
tttttttaagcagtggtatcaacgcagagtacnngatcttggnncatagcctnntttttttttttttttttttttttttttttt

SEQ ID NO: 2211 - DNA, 84 bp, Artificial
  Barcode component
  misc_feature (33)..(34): n is a, c, g, or t
  misc_feature (43)..(44): n is a, c, g, or t
  misc_feature (53)..(54): n is a, c, g, or t
tttttttaagcagtggtatcaacgcagagtacnngatcttggnnatcgagacnntttttttttttttttttttttttttttttt

SEQ ID NO: 2212 - DNA, 84 bp, Artificial
  Barcode component
  misc_feature (33)..(34): n is a, c, g, or t
  misc_feature (43)..(44): n is a, c, g, or t
  misc_feature (53)..(54): n is a, c, g, or t
tttttttaagcagtggtatcaacgcagagtacnngatcttggnnggaagagtnntttttttttttttttttttttttttttttt

SEQ ID NO: 2213 - DNA, 84 bp, Artificial
  Barcode component
  misc_feature (33)..(34): n is a, c, g, or t
  misc_feature (43)..(44): n is a, c, g, or t
  misc_feature (53)..(54): n is a, c, g, or t
tttttttaagcagtggtatcaacgcagagtacnngatcttggnnccaagtagnntttttttttttttttttttttttttttttt

SEQ ID NO: 2214 - DNA, 84 bp, Artificial
  Barcode component
  misc_feature (33)..(34): n is a, c, g, or t
  misc_feature (43)..(44): n is a, c, g, or t
  misc_feature (53)..(54): n is a, c, g, or t
tttttttaagcagtggtatcaacgcagagtacnngatcttggnnctgaacagnntttttttttttttttttttttttttttttt

SEQ ID NO: 2215 - DNA, 84 bp, Artificial
  Barcode component
  misc_feature (33)..(34): n is a, c, g, or t
  misc_feature (43)..(44): n is a, c, g, or t
  misc_feature (53)..(54): n is a, c, g, or t
tttttttaagcagtggtatcaacgcagagtacnngatcttggnngtaggttcnntttttttttttttttttttttttttttttt

SEQ ID NO: 2216 - DNA, 84 bp, Artificial
  Barcode component
  misc_feature (33)..(34): n is a, c, g, or t
  misc_feature (43)..(44): n is a, c, g, or t
  misc_feature (53)..(54): n is a, c, g, or t
tttttttaagcagtggtatcaacgcagagtacnngatcttggnngtatggacnntttttttttttttttttttttttttttttt

SEQ ID NO: 2217 - DNA, 84 bp, Artificial
  Barcode component
  misc_feature (33)..(34): n is a, c, g, or t
  misc_feature (43)..(44): n is a, c, g, or t
  misc_feature (53)..(54): n is a, c, g, or t
tttttttaagcagtggtatcaacgcagagtacnngatcttggnntcgcaacanntttttttttttttttttttttttttttttt

SEQ ID NO: 2218 - DNA, 84 bp, Artificial
  Barcode component
  misc_feature (33)..(34): n is a, c, g, or t
  misc_feature (43)..(44): n is a, c, g, or t
  misc_feature (53)..(54): n is a, c, g, or t
tttttttaagcagtggtatcaacgcagagtacnngatcttggnnccgctaatnntttttttttttttttttttttttttttttt

SEQ ID NO: 2219 - DNA, 84 bp, Artificial
  Barcode component
  misc_feature (33)..(34): n is a, c, g, or t
  misc_feature (43)..(44): n is a, c, g, or t
  misc_feature (53)..(54): n is a, c, g, or t
tttttttaagcagtggtatcaacgcagagtacnngatcttggnngattcgcanntttttttttttttttttttttttttttttt

SEQ ID NO: 2220 - DNA, 84 bp, Artificial
  Barcode component
  misc_feature (33)..(34): n is a, c, g, or t
  misc_feature (43)..(44): n is a, c, g, or t
  misc_feature (53)..(54): n is a, c, g, or t
tttttttaagcagtggtatcaacgcagagtacnngatcttggnncgatggaanntttttttttttttttttttttttttttttt

SEQ ID NO: 2221 - DNA, 84 bp, Artificial
  Barcode component
  misc_feature (33)..(34): n is a, c, g, or t
  misc_feature (43)..(44): n is a, c, g, or t
  misc_feature (53)..(54): n is a, c, g, or t
tttttttaagcagtggtatcaacgcagagtacnngatcttggnnagcaagganntttttttttttttttttttttttttttttt

SEQ ID NO: 2222 - DNA, 84 bp, Artificial
  Barcode component
  misc_feature (33)..(34): n is a, c, g, or t
  misc_feature (43)..(44): n is a, c, g, or t
  misc_feature (53)..(54): n is a, c, g, or t
tttttttaagcagtggtatcaacgcagagtacnngatcttggnncgtagcaanntttttttttttttttttttttttttttttt

SEQ ID NO: 2223 - DNA, 84 bp, Artificial
  Barcode component
  misc_feature (33)..(34): n is a, c, g, or t
  misc_feature (43)..(44): n is a, c, g, or t
  misc_feature (53)..(54): n is a, c, g, or t
tttttttaagcagtggtatcaacgcagagtacnngatcttggnntggcagtanntttttttttttttttttttttttttttttt

SEQ ID NO: 2224 - DNA, 84 bp, Artificial
  Barcode component
  misc_feature (33)..(34): n is a, c, g, or t
  misc_feature (43)..(44): n is a, c, g, or t
  misc_feature (53)..(54): n is a, c, g, or t
tttttttaagcagtggtatcaacgcagagtacnngatcttggnncggtagttnntttttttttttttttttttttttttttttt

SEQ ID NO: 2225 - DNA, 84 bp, Artificial
  Barcode component
  misc_feature (33)..(34): n is a, c, g, or t
  misc_feature (43)..(44): n is a, c, g, or t
  misc_feature (53)..(54): n is a, c, g, or t
tttttttaagcagtggtatcaacgcagagtacnngatcttggnntgacttcgnntttttttttttttttttttttttttttttt

SEQ ID NO: 2226 - DNA, 84 bp, Artificial
  Barcode component
  misc_feature (33)..(34): n is a, c, g, or t
  misc_feature (43)..(44): n is a, c, g, or t
  misc_feature (53)..(54): n is a, c, g, or t
tttttttaagcagtggtatcaacgcagagtacnngatcttggnngagtgcaanntttttttttttttttttttttttttttttt

SEQ ID NO: 2227 - DNA, 84 bp, Artificial
  Barcode component
  misc_feature (33)..(34): n is a, c, g, or t
  misc_feature (43)..(44): n is a, c, g, or t
  misc_feature (53)..(54): n is a, c, g, or t
tttttttaagcagtggtatcaacgcagagtacnngatcttggnnacggtaacnntttttttttttttttttttttttttttttt

SEQ ID NO: 2228 - DNA, 84 bp, Artificial
  Barcode component
  misc_feature (33)..(34): n is a, c, g, or t
  misc_feature (43)..(44): n is a, c, g, or t
  misc_feature (53)..(54): n is a, c, g, or t
tttttttaagcagtggtatcaacgcagagtacnngatcttggnnaagtggtgnntttttttttttttttttttttttttttttt

SEQ ID NO: 2229 - DNA, 84 bp, Artificial
  Barcode component
  misc_feature (33)..(34): n is a, c, g, or t
  misc_feature (43)..(44): n is a, c, g, or t
  misc_feature (53)..(54): n is a, c, g, or t
tttttttaagcagtggtatcaacgcagagtacnngatcttggnnggagacaanntttttttttttttttttttttttttttttt

SEQ ID NO: 2230 - DNA, 84 bp, Artificial
  Barcode component
  misc_feature (33)..(34): n is a, c, g, or t
  misc_feature (43)..(44): n is a, c, g, or t
  misc_feature (53)..(54): n is a, c, g, or t
tttttttaagcagtggtatcaacgcagagtacnngatcttggnntcaaggacnntttttttttttttttttttttttttttttt

SEQ ID NO: 2231 - DNA, 84 bp, Artificial
  Barcode component
  misc_feature (33)..(34): n is a, c, g, or t
  misc_feature (43)..(44): n is a, c, g, or t
  misc_feature (53)..(54): n is a, c, g, or t
tttttttaagcagtggtatcaacgcagagtacnngatcttggnnaagagagcnntttttttttttttttttttttttttttttt

SEQ ID NO: 2232 - DNA, 84 bp, Artificial
  Barcode component
  misc_feature (33)..(34): n is a, c, g, or t
  misc_feature (43)..(44): n is a, c, g, or t
  misc_feature (53)..(54): n is a, c, g, or t
tttttttaagcagtggtatcaacgcagagtacnngatcttggnncgagagatnntttttttttttttttttttttttttttttt

SEQ ID NO: 2233 - DNA, 84 bp, Artificial
  Barcode component
  misc_feature (33)..(34): n is a, c, g, or t
  misc_feature (43)..(44): n is a, c, g, or t
  misc_feature (53)..(54): n is a, c, g, or t
tttttttaagcagtggtatcaacgcagagtacnngatcttggnnacagatggnntttttttttttttttttttttttttttttt

SEQ ID NO: 2234 - DNA, 84 bp, Artificial
  Barcode component
  misc_feature (33)..(34): n is a, c, g, or t
  misc_feature (43)..(44): n is a, c, g, or t
  misc_feature (53)..(54): n is a, c, g, or t
tttttttaagcagtggtatcaacgcagagtacnngatcttggnnaggagtcanntttttttttttttttttttttttttttttt

SEQ ID NO: 2235 - DNA, 84 bp, Artificial
  Barcode component
  misc_feature (33)..(34): n is a, c, g, or t
  misc_feature (43)..(44): n is a, c, g, or t
  misc_feature (53)..(54): n is a, c, g, or t
tttttttaagcagtggtatcaacgcagagtacnngatcttggnncgtgttacnntttttttttttttttttttttttttttttt

SEQ ID NO: 2236 - DNA, 84 bp, Artificial
  Barcode component
  misc_feature (33)..(34): n is a, c, g, or t
  misc_feature (43)..(44): n is a, c, g, or t
  misc_feature (53)..(54): n is a, c, g, or t
tttttttaagcagtggtatcaacgcagagtacnngatcttggnntagtgtgcnntttttttttttttttttttttttttttttt

SEQ ID NO: 2237 - DNA, 84 bp, Artificial
  Barcode component
  misc_feature (33)..(34): n is a, c, g, or t
  misc_feature (43)..(44): n is a, c, g, or t
  misc_feature (53)..(54): n is a, c, g, or t
tttttttaagcagtggtatcaacgcagagtacnngatcttggnnctcatgacnntttttttttttttttttttttttttttttt

SEQ ID NO: 2238 - DNA, 84 bp, Artificial
  Barcode component
  misc_feature (33)..(34): n is a, c, g, or t
  misc_feature (43)..(44): n is a, c, g, or t
  misc_feature (53)..(54): n is a, c, g, or t
tttttttaagcagtggtatcaacgcagagtacnngatcttggnngtatccagnntttttttttttttttttttttttttttttt

SEQ ID NO: 2239 - DNA, 84 bp, Artificial
  Barcode component
  misc_feature (33)..(34): n is a, c, g, or t
  misc_feature (43)..(44): n is a, c, g, or t
  misc_feature (53)..(54): n is a, c, g, or t
tttttttaagcagtggtatcaacgcagagtacnngatcttggnnacgcctatnntttttttttttttttttttttttttttttt

SEQ ID NO: 2240 - DNA, 84 bp, Artificial
  Barcode component
  misc_feature (33)..(34): n is a, c, g, or t
  misc_feature (43)..(44): n is a, c, g, or t
  misc_feature (53)..(54): n is a, c, g, or t
tttttttaagcagtggtatcaacgcagagtacnngatcttggnnaacgacctnntttttttttttttttttttttttttttttt

SEQ ID NO: 2241 - DNA, 84 bp, Artificial
  Barcode component
  misc_feature (33)..(34): n is a, c, g, or t
  misc_feature (43)..(44): n is a, c, g, or t
  misc_feature (53)..(54): n is a, c, g, or t
tttttttaagcagtggtatcaacgcagagtacnngatcttggnnatcaggctnntttttttttttttttttttttttttttttt

SEQ ID NO: 2242 - DNA, 84 bp, Artificial
  Barcode component
  misc_feature (33)..(34): n is a, c, g, or t
  misc_feature (43)..(44): n is a, c, g, or t
  misc_feature (53)..(54): n is a, c, g, or t
tttttttaagcagtggtatcaacgcagagtacnngatcttggnncaagttcgnntttttttttttttttttttttttttttttt

SEQ ID NO: 2243 - DNA, 84 bp, Artificial
  Barcode component
  misc_feature (33)..(34): n is a, c, g, or t
  misc_feature (43)..(44): n is a, c, g, or t
  misc_feature (53)..(54): n is a, c, g, or t
tttttttaagcagtggtatcaacgcagagtacnngatcttggnntagccaganntttttttttttttttttttttttttttttt

SEQ ID NO: 2244 - DNA, 84 bp, Artificial
  Barcode component
  misc_feature (33)..(34): n is a, c, g, or t
  misc_feature (43)..(44): n is a, c, g, or t
  misc_feature (53)..(54): n is a, c, g, or t
tttttttaagcagtggtatcaacgcagagtacnngatcttggnncaatcacgnntttttttttttttttttttttttttttttt

SEQ ID NO: 2245 - DNA, 84 bp, Artificial
  Barcode component
  misc_feature (33)..(34): n is a, c, g, or t
  misc_feature (43)..(44): n is a, c, g, or t
  misc_feature (53)..(54): n is a, c, g, or t
tttttttaagcagtggtatcaacgcagagtacnngatcttggnngcaacaagnntttttttttttttttttttttttttttttt

SEQ ID NO: 2246 - DNA, 84 bp, Artificial
  Barcode component
  misc_feature (33)..(34): n is a, c, g, or t
  misc_feature (43)..(44): n is a, c, g, or t
  misc_feature (53)..(54): n is a, c, g, or t
tttttttaagcagtggtatcaacgcagagtacnngatcttggnncacgacaanntttttttttttttttttttttttttttttt

SEQ ID NO: 2247 - DNA, 84 bp, Artificial
  Barcode component
  misc_feature (33)..(34): n is a, c, g, or t
  misc_feature (43)..(44): n is a, c, g, or t
  misc_feature (53)..(54): n is a, c, g, or t
tttttttaagcagtggtatcaacgcagagtacnngatcttggnntacggaganntttttttttttttttttttttttttttttt

SEQ ID NO: 2248 - DNA, 84 bp, Artificial
  Barcode component
  misc_feature (33)..(34): n is a, c, g, or t
  misc_feature (43)..(44): n is a, c, g, or t
  misc_feature (53)..(54): n is a, c, g, or t
tttttttaagcagtggtatcaacgcagagtacnngatcttggnncgacaaganntttttttttttttttttttttttttttttt

SEQ ID NO: 2249 - DNA, 84 bp, Artificial
  Barcode component
  misc_feature (33)..(34): n is a, c, g, or t
  misc_feature (43)..(44): n is a, c, g, or t
  misc_feature (53)..(54): n is a, c, g, or t
tttttttaagcagtggtatcaacgcagagtacnngatcttggnncgaagtganntttttttttttttttttttttttttttttt

SEQ ID NO: 2250 - DNA, 84 bp, Artificial
  Barcode component
  misc_feature (33)..(34): n is a, c, g, or t
  misc_feature (43)..(44): n is a, c, g, or t
  misc_feature (53)..(54): n is a, c, g, or t
tttttttaagcagtggtatcaacgcagagtacnngatcttggnnagctggtanntttttttttttttttttttttttttttttt

SEQ ID NO: 2251 - DNA, 84 bp, Artificial
  Barcode component
  misc_feature (33)..(34): n is a, c, g, or t
  misc_feature (43)..(44): n is a, c, g, or t
  misc_feature (53)..(54): n is a, c, g, or t
tttttttaagcagtggtatcaacgcagagtacnngatcttggnnaactaggcnntttttttttttttttttttttttttttttt

SEQ ID NO: 2252 - DNA, 84 bp, Artificial
  Barcode component
  misc_feature (33)..(34): n is a, c, g, or t
  misc_feature (43)..(44): n is a, c, g, or t
  misc_feature (53)..(54): n is a, c, g, or t
tttttttaagcagtggtatcaacgcagagtacnngatcttggnncagcaagtnntttttttttttttttttttttttttttttt

SEQ ID NO: 2253 - DNA, 84 bp, Artificial
  Barcode component
  misc_feature (33)..(34): n is a, c, g, or t
  misc_feature (43)..(44): n is a, c, g, or t
  misc_feature (53)..(54): n is a, c, g, or t
tttttttaagcagtggtatcaacgcagagtacnngatcttggnnacgaggtanntttttttttttttttttttttttttttttt

SEQ ID NO: 2254 - DNA, 84 bp, Artificial
  Barcode component
  misc_feature (33)..(34): n is a, c, g, or t
  misc_feature (43)..(44): n is a, c, g, or t
  misc_feature (53)..(54): n is a, c, g, or t
tttttttaagcagtggtatcaacgcagagtacnngatcttggnncatcttccnntttttttttttttttttttttttttttttt

SEQ ID NO: 2255 - DNA, 84 bp, Artificial
  Barcode component
  misc_feature (33)..(34): n is a, c, g, or t
  misc_feature (43)..(44): n is a, c, g, or t
  misc_feature (53)..(54): n is a, c, g, or t
tttttttaagcagtggtatcaacgcagagtacnngatcttggnncctgaatcnntttttttttttttttttttttttttttttt

SEQ ID NO: 2256 - DNA, 84 bp, Artificial
  Barcode component
  misc_feature (33)..(34): n is a, c, g, or t
  misc_feature (43)..(44): n is a, c, g, or t
  misc_feature (53)..(54): n is a, c, g, or t
tttttttaagcagtggtatcaacgcagagtacnngatcttggnntgcagactnntttttttttttttttttttttttttttttt

SEQ ID NO: 2257 - DNA, 84 bp, Artificial
  Barcode component
  misc_feature (33)..(34): n is a, c, g, or t
  misc_feature (43)..(44): n is a, c, g, or t
  misc_feature (53)..(54): n is a, c, g, or t
tttttttaagcagtggtatcaacgcagagtacnngatcttggnnagatgtggnntttttttttttttttttttttttttttttt

SEQ ID NO: 2258 - DNA, 84 bp, Artificial
  Barcode component
  misc_feature (33)..(34): n is a, c, g, or t
  misc_feature (43)..(44): n is a, c, g, or t
  misc_feature (53)..(54): n is a, c, g, or t
tttttttaagcagtggtatcaacgcagagtacnngatcttggnnagttcgacnntttttttttttttttttttttttttttttt

SEQ ID NO: 2259 - DNA, 84 bp, Artificial
  Barcode component
  misc_feature (33)..(34): n is a, c, g, or t
  misc_feature (43)..(44): n is a, c, g, or t
  misc_feature (53)..(54): n is a, c, g, or t
tttttttaagcagtggtatcaacgcagagtacnngatcttggnnacaacctcnntttttttttttttttttttttttttttttt

SEQ ID NO: 2260 - DNA, 84 bp, Artificial
  Barcode component
  misc_feature (33)..(34): n is a, c, g, or t
  misc_feature (43)..(44): n is a, c, g, or t
  misc_feature (53)..(54): n is a, c, g, or t
tttttttaagcagtggtatcaacgcagagtacnngatcttggnncatggtagnntttttttttttttttttttttttttttttt

SEQ ID NO: 2261 - DNA, 84 bp, Artificial
  Barcode component
  misc_feature (33)..(34): n is a, c, g, or t
  misc_feature (43)..(44): n is a, c, g, or t
  misc_feature (53)..(54): n is a, c, g, or t
tttttttaagcagtggtatcaacgcagagtacnngatcttggnncgtatctcnntttttttttttttttttttttttttttttt

SEQ ID NO: 2262 - DNA, 84 bp, Artificial
  Barcode component
  misc_feature (33)..(34): n is a, c, g, or t
  misc_feature (43)..(44): n is a, c, g, or t
  misc_feature (53)..(54): n is a, c, g, or t
tttttttaagcagtggtatcaacgcagagtacnngatcttggnncctagttcnntttttttttttttttttttttttttttttt

SEQ ID NO: 2263 - DNA, 84 bp, Artificial
  Barcode component
  misc_feature (33)..(34): n is a, c, g, or t
  misc_feature (43)..(44): n is a, c, g, or t
  misc_feature (53)..(54): n is a, c, g, or t
tttttttaagcagtggtatcaacgcagagtacnngatcttggnncaagagtcnntttttttttttttttttttttttttttttt

SEQ ID NO: 2264 - DNA, 84 bp, Artificial
  Barcode component
  misc_feature (33)..(34): n is a, c, g, or t
  misc_feature (43)..(44): n is a, c, g, or t
  misc_feature (53)..(54): n is a, c, g, or t
tttttttaagcagtggtatcaacgcagagtacnngtgaggaannaatcggcanntttttttttttttttttttttttttttttt

SEQ ID NO: 2265 - DNA, 84 bp, Artificial
  Barcode component
  misc_feature (33)..(34): n is a, c, g, or t
  misc_feature (43)..(44): n is a, c, g, or t
  misc_feature (53)..(54): n is a, c, g, or t
tttttttaagcagtggtatcaacgcagagtacnngtgaggaanntacggcatnntttttttttttttttttttttttttttttt

SEQ ID NO: 2266 - DNA, 84 bp, Artificial
  Barcode component
  misc_feature (33)..(34): n is a, c, g, or t
  misc_feature (43)..(44): n is a, c, g, or t
  misc_feature (53)..(54): n is a, c, g, or t
tttttttaagcagtggtatcaacgcagagtacnngtgaggaannttggatcgnntttttttttttttttttttttttttttttt

SEQ ID NO: 2267 - DNA, 84 bp, Artificial
  Barcode component
  misc_feature (33)..(34): n is a, c, g, or t
  misc_feature (43)..(44): n is a, c, g, or t
  misc_feature (53)..(54): n is a, c, g, or t
tttttttaagcagtggtatcaacgcagagtacnngtgaggaanntggaacganntttttttttttttttttttttttttttttt

SEQ ID NO: 2268 - DNA, 84 bp, Artificial
  Barcode component
  misc_feature (33)..(34): n is a, c, g, or t
  misc_feature (43)..(44): n is a, c, g, or t
  misc_feature (53)..(54): n is a, c, g, or t
tttttttaagcagtggtatcaacgcagagtacnngtgaggaannggcaatcanntttttttttttttttttttttttttttttt

SEQ ID NO: 2269 - DNA, 84 bp, Artificial
  Barcode component
  misc_feature (33)..(34): n is a, c, g, or t
  misc_feature (43)..(44): n is a, c, g, or t
  misc_feature (53)..(54): n is a, c, g, or t
tttttttaagcagtggtatcaacgcagagtacnngtgaggaanngaatccganntttttttttttttttttttttttttttttt

SEQ ID NO: 2270 - DNA, 84 bp, Artificial
  Barcode component
  misc_feature (33)..(34): n is a, c, g, or t
  misc_feature (43)..(44): n is a, c, g, or t
  misc_feature (53)..(54): n is a, c, g, or t
tttttttaagcagtggtatcaacgcagagtacnngtgaggaannttacggtgnntttttttttttttttttttttttttttttt

SEQ ID NO: 2271 - DNA, 84 bp, Artificial
  Barcode component
  misc_feature (33)..(34): n is a, c, g, or t
  misc_feature (43)..(44): n is a, c, g, or t
  misc_feature (53)..(54): n is a, c, g, or t
tttttttaagcagtggtatcaacgcagagtacnngtgaggaanncatatcggnntttttttttttttttttttttttttttttt

SEQ ID NO: 2272 - DNA, 84 bp, Artificial
  Barcode component
  misc_feature (33)..(34): n is a, c, g, or t
  misc_feature (43)..(44): n is a, c, g, or t
  misc_feature (53)..(54): n is a, c, g, or t
tttttttaagcagtggtatcaacgcagagtacnngtgaggaanncttcggtanntttttttttttttttttttttttttttttt

SEQ ID NO: 2273 - DNA, 84 bp, Artificial
  Barcode component
  misc_feature (33)..(34): n is a, c, g, or t
  misc_feature (43)..(44): n is a, c, g, or t
  misc_feature (53)..(54): n is a, c, g, or t
tttttttaagcagtggtatcaacgcagagtacnngtgaggaanntcctaacgnntttttttttttttttttttttttttttttt

SEQ ID NO: 2274 - DNA, 84 bp, Artificial
  Barcode component
  misc_feature (33)..(34): n is a, c, g, or t
  misc_feature (43)..(44): n is a, c, g, or t
  misc_feature (53)..(54): n is a, c, g, or t
tttttttaagcagtggtatcaacgcagagtacnngtgaggaanngtaagccanntttttttttttttttttttttttttttttt

SEQ ID NO: 2275 - DNA, 84 bp, Artificial
  Barcode component
  misc_feature (33)..(34): n is a, c, g, or t
  misc_feature (43)..(44): n is a, c, g, or t
  misc_feature (53)..(54): n is a, c, g, or t
tttttttaagcagtggtatcaacgcagagtacnngtgaggaanntaaggtggnntttttttttttttttttttttttttttttt

SEQ ID NO: 2276 - DNA, 84 bp, Artificial
  Barcode component
  misc_feature (33)..(34): n is a, c, g, or t
  misc_feature (43)..(44): n is a, c, g, or t
  misc_feature (53)..(54): n is a, c, g, or t
tttttttaagcagtggtatcaacgcagagtacnngtgaggaannggtaagctnntttttttttttttttttttttttttttttt

SEQ ID NO: 2277 - DNA, 84 bp, Artificial
  Barcode component
  misc_feature (33)..(34): n is a, c, g, or t
  misc_feature (43)..(44): n is a, c, g, or t
  misc_feature (53)..(54): n is a, c, g, or t
tttttttaagcagtggtatcaacgcagagtacnngtgaggaanntgtgtcganntttttttttttttttttttttttttttttt

SEQ ID NO: 2278 - DNA, 84 bp, Artificial
  Barcode component
  misc_feature (33)..(34): n is a, c, g, or t
  misc_feature (43)..(44): n is a, c, g, or t
  misc_feature (53)..(54): n is a, c, g, or t
tttttttaagcagtggtatcaacgcagagtacnngtgaggaanngagcatganntttttttttttttttttttttttttttttt

SEQ ID NO: 2279 - DNA, 84 bp, Artificial
  Barcode component
  misc_feature (33)..(34): n is a, c, g, or t
  misc_feature (43)..(44): n is a, c, g, or t
  misc_feature (53)..(54): n is a, c, g, or t
tttttttaagcagtggtatcaacgcagagtacnngtgaggaanntcgaagtcnntttttttttttttttttttttttttttttt

SEQ ID NO: 2280 - DNA, 84 bp, Artificial
  Barcode component
  misc_feature (33)..(34): n is a, c, g, or t
  misc_feature (43)..(44): n is a, c, g, or t
  misc_feature (53)..(54): n is a, c, g, or t
tttttttaagcagtggtatcaacgcagagtacnngtgaggaannggtgaacanntttttttttttttttttttttttttttttt

SEQ ID NO: 2281 - DNA, 84 bp, Artificial
  Barcode component
  misc_feature (33)..(34): n is a, c, g, or t
  misc_feature (43)..(44): n is a, c, g, or t
  misc_feature (53)..(54): n is a, c, g, or t
tttttttaagcagtggtatcaacgcagagtacnngtgaggaannacatgcacnntttttttttttttttttttttttttttttt

SEQ ID NO: 2282 - DNA, 84 bp, Artificial
  Barcode component
  misc_feature (33)..(34): n is a, c, g, or t
  misc_feature (43)..(44): n is a, c, g, or t
  misc_feature (53)..(54): n is a, c, g, or t
tttttttaagcagtggtatcaacgcagagtacnngtgaggaannccaacagtnntttttttttttttttttttttttttttttt

SEQ ID NO: 2283 - DNA, 84 bp, Artificial
  Barcode component
  misc_feature (33)..(34): n is a, c, g, or t
  misc_feature (43)..(44): n is a, c, g, or t
  misc_feature (53)..(54): n is a, c, g, or t
tttttttaagcagtggtatcaacgcagagtacnngtgaggaannagaacagcnntttttttttttttttttttttttttttttt

SEQ ID NO: 2284 - DNA, 84 bp, Artificial
  Barcode component
  misc_feature (33)..(34): n is a, c, g, or t
  misc_feature (43)..(44): n is a, c, g, or t
  misc_feature (53)..(54): n is a, c, g, or t
tttttttaagcagtggtatcaacgcagagtacnngtgaggaanngaacacgtnntttttttttttttttttttttttttttttt

SEQ ID NO: 2285 - DNA, 84 bp, Artificial
  Barcode component
  misc_feature (33)..(34): n is a, c, g, or t
  misc_feature (43)..(44): n is a, c, g, or t
  misc_feature (53)..(54): n is a, c, g, or t
tttttttaagcagtggtatcaacgcagagtacnngtgaggaannggtcttcanntttttttttttttttttttttttttttttt

SEQ ID NO: 2286 - DNA, 84 bp, Artificial
  Barcode component
  misc_feature (33)..(34): n is a, c, g, or t
  misc_feature (43)..(44): n is a, c, g, or t
  misc_feature (53)..(54): n is a, c, g, or t
tttttttaagcagtggtatcaacgcagagtacnngtgaggaannaggttcagnntttttttttttttttttttttttttttttt

SEQ ID NO: 2287 - DNA, 84 bp, Artificial
  Barcode component
  misc_feature (33)..(34): n is a, c, g, or t
  misc_feature (43)..(44): n is a, c, g, or t
  misc_feature (53)..(54): n is a, c, g, or t
tttttttaagcagtggtatcaacgcagagtacnngtgaggaannctagagcanntttttttttttttttttttttttttttttt

SEQ ID NO: 2288 - DNA, 84 bp, Artificial
  Barcode component
  misc_feature (33)..(34): n is a, c, g, or t
  misc_feature (43)..(44): n is a, c, g, or t
  misc_feature (53)..(54): n is a, c, g, or t
tttttttaagcagtggtatcaacgcagagtacnngtgaggaanncttctagcnntttttttttttttttttttttttttttttt

SEQ ID NO: 2289 - DNA, 84 bp, Artificial
  Barcode component
  misc_feature (33)..(34): n is a, c, g, or t
  misc_feature (43)..(44): n is a, c, g, or t
  misc_feature (53)..(54): n is a, c, g, or t
tttttttaagcagtggtatcaacgcagagtacnngtgaggaanngagtaacgnntttttttttttttttttttttttttttttt

SEQ ID NO: 2290 - DNA, 84 bp, Artificial
  Barcode component
  misc_feature (33)..(34): n is a, c, g, or t
  misc_feature (43)..(44): n is a, c, g, or t
  misc_feature (53)..(54): n is a, c, g, or t
tttttttaagcagtggtatcaacgcagagtacnngtgaggaannctaagaggnntttttttttttttttttttttttttttttt

SEQ ID NO: 2291 - DNA, 84 bp, Artificial
  Barcode component
  misc_feature (33)..(34): n is a, c, g, or t
  misc_feature (43)..(44): n is a, c, g, or t
  misc_feature (53)..(54): n is a, c, g, or t
tttttttaagcagtggtatcaacgcagagtacnngtgaggaannacgtgtagnntttttttttttttttttttttttttttttt

SEQ ID NO: 2292 - DNA, 84 bp, Artificial
  Barcode component
  misc_feature (33)..(34): n is a, c, g, or t
  misc_feature (43)..(44): n is a, c, g, or t
  misc_feature (53)..(54): n is a, c, g, or t
tttttttaagcagtggtatcaacgcagagtacnngtgaggaannactacaggnntttttttttttttttttttttttttttttt

SEQ ID NO: 2293 - DNA, 84 bp, Artificial
  Barcode component
  misc_feature (33)..(34): n is a, c, g, or t
  misc_feature (43)..(44): n is a, c, g, or t
  misc_feature (53)..(54): n is a, c, g, or t
tttttttaagcagtggtatcaacgcagagtacnngtgaggaanntacaggtcnntttttttttttttttttttttttttttttt

SEQ ID NO: 2294 - DNA, 84 bp, Artificial
  Barcode component
  misc_feature (33)..(34): n is a, c, g, or t
  misc_feature (43)..(44): n is a, c, g, or t
  misc_feature (53)..(54): n is a, c, g, or t
tttttttaagcagtggtatcaacgcagagtacnngtgaggaannctcacatgnntttttttttttttttttttttttttttttt

SEQ ID NO: 2295 - DNA, 84 bp, Artificial
  Barcode component
  misc_feature (33)..(34): n is a, c, g, or t
  misc_feature (43)..(44): n is a, c, g, or t
  misc_feature (53)..(54): n is a, c, g, or t
tttttttaagcagtggtatcaacgcagagtacnngtgaggaannactaggagnntttttttttttttttttttttttttttttt

SEQ ID NO: 2296 - DNA, 84 bp, Artificial
  Barcode component
  misc_feature (33)..(34): n is a, c, g, or t
  misc_feature (43)..(44): n is a, c, g, or t
  misc_feature (53)..(54): n is a, c, g, or t
tttttttaagcagtggtatcaacgcagagtacnngtgaggaannccatagganntttttttttttttttttttttttttttttt

SEQ ID NO: 2297 - DNA, 84 bp, Artificial
  Barcode component
  misc_feature (33)..(34): n is a, c, g, or t
  misc_feature (43)..(44): n is a, c, g, or t
  misc_feature (53)..(54): n is a, c, g, or t
tttttttaagcagtggtatcaacgcagagtacnngtgaggaannggagaatcnntttttttttttttttttttttttttttttt

SEQ ID NO: 2298 - DNA, 84 bp, Artificial
  Barcode component
  misc_feature (33)..(34): n is a, c, g, or t
  misc_feature (43)..(44): n is a, c, g, or t
  misc_feature (53)..(54): n is a, c, g, or t
tttttttaagcagtggtatcaacgcagagtacnngtgaggaanngccaagaanntttttttttttttttttttttttttttttt

SEQ ID NO: 2299 - DNA, 84 bp, Artificial
  Barcode component
  misc_feature (33)..(34): n is a, c, g, or t
  misc_feature (43)..(44): n is a, c, g, or t
  misc_feature (53)..(54): n is a, c, g, or t
tttttttaagcagtggtatcaacgcagagtacnngtgaggaannaaggcaagnntttttttttttttttttttttttttttttt

SEQ ID NO: 2300 - DNA, 84 bp, Artificial
  Barcode component
  misc_feature (33)..(34): n is a, c, g, or t
  misc_feature (43)..(44): n is a, c, g, or t
  misc_feature (53)..(54): n is a, c, g, or t
tttttttaagcagtggtatcaacgcagagtacnngtgaggaannaatgtcgcnntttttttttttttttttttttttttttttt

SEQ ID NO: 2301 - DNA, 84 bp, Artificial
  Barcode component
  misc_feature (33)..(34): n is a, c, g, or t
  misc_feature (43)..(44): n is a, c, g, or t
  misc_feature (53)..(54): n is a, c, g, or t
tttttttaagcagtggtatcaacgcagagtacnngtgaggaannatggaaccnntttttttttttttttttttttttttttttt

SEQ ID NO: 2302 - DNA, 84 bp, Artificial
  Barcode component
  misc_feature (33)..(34): n is a, c, g, or t
  misc_feature (43)..(44): n is a, c, g, or t
  misc_feature (53)..(54): n is a, c, g, or t
tttttttaagcagtggtatcaacgcagagtacnngtgaggaannagaggcatnntttttttttttttttttttttttttttttt

SEQ ID NO: 2303 - DNA, 84 bp, Artificial
  Barcode component
  misc_feature (33)..(34): n is a, c, g, or t
  misc_feature (43)..(44): n is a, c, g, or t
  misc_feature (53)..(54): n is a, c, g, or t
tttttttaagcagtggtatcaacgcagagtacnngtgaggaanntgcatagcnntttttttttttttttttttttttttttttt

SEQ ID NO: 2304 - DNA, 84 bp, Artificial
  Barcode component
  misc_feature (33)..(34): n is a, c, g, or t
  misc_feature (43)..(44): n is a, c, g, or t
  misc_feature (53)..(54): n is a, c, g, or t
tttttttaagcagtggtatcaacgcagagtacnngtgaggaannctaacgganntttttttttttttttttttttttttttttt

SEQ ID NO: 2305 - DNA, 84 bp, Artificial
  Barcode component
  misc_feature (33)..(34): n is a, c, g, or t
  misc_feature (43)..(44): n is a, c, g, or t
  misc_feature (53)..(54): n is a, c, g, or t
tttttttaagcagtggtatcaacgcagagtacnngtgaggaanntatcgaggnntttttttttttttttttttttttttttttt

SEQ ID NO: 2306 - DNA, 84 bp, Artificial
  Barcode component
  misc_feature (33)..(34): n is a, c, g, or t
  misc_feature (43)..(44): n is a, c, g, or t
  misc_feature (53)..(54): n is a, c, g, or t
tttttttaagcagtggtatcaacgcagagtacnngtgaggaanncatagcctnntttttttttttttttttttttttttttttt

SEQ ID NO: 2307 - DNA, 84 bp, Artificial
  Barcode component
  misc_feature (33)..(34): n is a, c, g, or t
  misc_feature (43)..(44): n is a, c, g, or t
  misc_feature (53)..(54): n is a, c, g, or t
tttttttaagcagtggtatcaacgcagagtacnngtgaggaannatcgagacnntttttttttttttttttttttttttttttt

SEQ ID NO: 2308 - DNA, 84 bp, Artificial
  Barcode component
  misc_feature (33)..(34): n is a, c, g, or t
  misc_feature (43)..(44): n is a, c, g, or t
  misc_feature (53)..(54): n is a, c, g, or t
tttttttaagcagtggtatcaacgcagagtacnngtgaggaannggaagagtnntttttttttttttttttttttttttttttt

SEQ ID NO: 2309 - DNA, 84 bp, Artificial
  Barcode component
  misc_feature (33)..(34): n is a, c, g, or t
  misc_feature (43)..(44): n is a, c, g, or t
  misc_feature (53)..(54): n is a, c, g, or t
tttttttaagcagtggtatcaacgcagagtacnngtgaggaannccaagtagnntttttttttttttttttttttttttttttt

SEQ ID NO: 2310 - DNA, 84 bp, Artificial
  Barcode component
  misc_feature (33)..(34): n is a, c, g, or t
  misc_feature (43)..(44): n is a, c, g, or t
  misc_feature (53)..(54): n is a, c, g, or t
tttttttaagcagtggtatcaacgcagagtacnngtgaggaannctgaacagnntttttttttttttttttttttttttttttt

SEQ ID NO: 2311 - DNA, 84 bp, Artificial
  Barcode component
  misc_feature (33)..(34): n is a, c, g, or t
  misc_feature (43)..(44): n is a, c, g, or t
  misc_feature (53)..(54): n is a, c, g, or t
tttttttaagcagtggtatcaacgcagagtacnngtgaggaanngtaggttcnntttttttttttttttttttttttttttttt

SEQ ID NO: 2312 - DNA, 84 bp, Artificial
  Barcode component
  misc_feature (33)..(34): n is a, c, g, or t
  misc_feature (43)..(44): n is a, c, g, or t
  misc_feature (53)..(54): n is a, c, g, or t
tttttttaagcagtggtatcaacgcagagtacnngtgaggaanngtatggacnntttttttttttttttttttttttttttttt

SEQ ID NO: 2313 - DNA, 84 bp, Artificial
  Barcode component
  misc_feature (33)..(34): n is a, c, g, or t
  misc_feature (43)..(44): n is a, c, g, or t
  misc_feature (53)..(54): n is a, c, g, or t
tttttttaagcagtggtatcaacgcagagtacnngtgaggaanntcgcaacanntttttttttttttttttttttttttttttt

SEQ ID NO: 2314 - DNA, 84 bp, Artificial
  Barcode component
  misc_feature (33)..(34): n is a, c, g, or t
  misc_feature (43)..(44): n is a, c, g, or t
  misc_feature (53)..(54): n is a, c, g, or t
tttttttaagcagtggtatcaacgcagagtacnngtgaggaannccgctaatnntttttttttttttttttttttttttttttt

SEQ ID NO: 2315 - DNA, 84 bp, Artificial
  Barcode component
  misc_feature (33)..(34): n is a, c, g, or t
  misc_feature (43)..(44): n is a, c, g, or t
  misc_feature (53)..(54): n is a, c, g, or t
tttttttaagcagtggtatcaacgcagagtacnngtgaggaanngattcgcanntttttttttttttttttttttttttttttt

SEQ ID NO: 2316 - DNA, 84 bp, Artificial
  Barcode component
  misc_feature (33)..(34): n is a, c, g, or t
  misc_feature (43)..(44): n is a, c, g, or t
  misc_feature (53)..(54): n is a, c, g, or t
tttttttaagcagtggtatcaacgcagagtacnngtgaggaanncgatggaanntttttttttttttttttttttttttttttt

SEQ ID NO: 2317 - DNA, 84 bp, Artificial
  Barcode component
  misc_feature (33)..(34): n is a, c, g, or t
  misc_feature (43)..(44): n is a, c, g, or t
  misc_feature (53)..(54): n is a, c, g, or t
tttttttaagcagtggtatcaacgcagagtacnngtgaggaannagcaagganntttttttttttttttttttttttttttttt

SEQ ID NO: 2318 - DNA, 84 bp, Artificial
  Barcode component
  misc_feature (33)..(34): n is a, c, g, or t
  misc_feature (43)..(44): n is a, c, g, or t
  misc_feature (53)..(54): n is a, c, g, or t
tttttttaagcagtggtatcaacgcagagtacnngtgaggaanncgtagcaanntttttttttttttttttttttttttttttt

SEQ ID NO: 2319 - DNA, 84 bp, Artificial
  Barcode component
  misc_feature (33)..(34): n is a, c, g, or t
  misc_feature (43)..(44): n is a, c, g, or t
  misc_feature (53)..(54): n is a, c, g, or t
tttttttaagcagtggtatcaacgcagagtacnngtgaggaanntggcagtanntttttttttttttttttttttttttttttt

SEQ ID NO: 2320 - DNA, 84 bp, Artificial
  Barcode component
  misc_feature (33)..(34): n is a, c, g, or t
  misc_feature (43)..(44): n is a, c, g, or t
  misc_feature (53)..(54): n is a, c, g, or t
tttttttaagcagtggtatcaacgcagagtacnngtgaggaanncggtagttnntttttttttttttttttttttttttttttt

SEQ ID NO: 2321 - DNA, 84 bp, Artificial
  Barcode component
  misc_feature (33)..(34): n is a, c, g, or t
  misc_feature (43)..(44): n is a, c, g, or t
  misc_feature (53)..(54): n is a, c, g, or t
tttttttaagcagtggtatcaacgcagagtacnngtgaggaanntgacttcgnntttttttttttttttttttttttttttttt

SEQ ID NO: 2322 - DNA, 84 bp, Artificial
  Barcode component
  misc_feature (33)..(34): n is a, c, g, or t
  misc_feature (43)..(44): n is a, c, g, or t
  misc_feature (53)..(54): n is a, c, g, or t
tttttttaagcagtggtatcaacgcagagtacnngtgaggaanngagtgcaanntttttttttttttttttttttttttttttt

SEQ ID NO: 2323 - DNA, 84 bp, Artificial
  Barcode component
  misc_feature (33)..(34): n is a, c, g, or t
  misc_feature (43)..(44): n is a, c, g, or t
  misc_feature (53)..(54): n is a, c, g, or t
tttttttaagcagtggtatcaacgcagagtacnngtgaggaannacggtaacnntttttttttttttttttttttttttttttt

SEQ ID NO: 2324 - DNA, 84 bp, Artificial
  Barcode component
  misc_feature (33)..(34): n is a, c, g, or t
  misc_feature (43)..(44): n is a, c, g, or t
  misc_feature (53)..(54): n is a, c, g, or t
tttttttaagcagtggtatcaacgcagagtacnngtgaggaannaagtggtgnntttttttttttttttttttttttttttttt

SEQ ID NO: 2325 - DNA, 84 bp, Artificial
  Barcode component
  misc_feature (33)..(34): n is a, c, g, or t
  misc_feature (43)..(44): n is a, c, g, or t
  misc_feature (53)..(54): n is a, c, g, or t
tttttttaagcagtggtatcaacgcagagtacnngtgaggaannggagacaanntttttttttttttttttttttttttttttt

SEQ ID NO: 2326 - DNA, 84 bp, Artificial
  Barcode component
  misc_feature (33)..(34): n is a, c, g, or t
  misc_feature (43)..(44): n is a, c, g, or t
  misc_feature (53)..(54): n is a, c, g, or t
tttttttaagcagtggtatcaacgcagagtacnngtgaggaanntcaaggacnntttttttttttttttttttttttttttttt

SEQ ID NO: 2327 - DNA, 84 bp, Artificial
  Barcode component
  misc_feature (33)..(34): n is a, c, g, or t
  misc_feature (43)..(44): n is a, c, g, or t
  misc_feature (53)..(54): n is a, c, g, or t
tttttttaagcagtggtatcaacgcagagtacnngtgaggaannaagagagcnntttttttttttttttttttttttttttttt

SEQ ID NO: 2328 - DNA, 84 bp, Artificial
  Barcode component
  misc_feature (33)..(34): n is a, c, g, or t
  misc_feature (43)..(44): n is a, c, g, or t
  misc_feature (53)..(54): n is a, c, g, or t
tttttttaagcagtggtatcaacgcagagtacnngtgaggaanncgagagatnntttttttttttttttttttttttttttttt

SEQ ID NO: 2329 - DNA, 84 bp, Artificial
  Barcode component
  misc_feature (33)..(34): n is a, c, g, or t
  misc_feature (43)..(44): n is a, c, g, or t
  misc_feature (53)..(54): n is a, c, g, or t
tttttttaagcagtggtatcaacgcagagtacnngtgaggaannacagatggnntttttttttttttttttttttttttttttt

SEQ ID NO: 2330 - DNA, 84 bp, Artificial
  Barcode component
  misc_feature (33)..(34): n is a, c, g, or t
  misc_feature (43)..(44): n is a, c, g, or t
  misc_feature (53)..(54): n is a, c, g, or t
tttttttaagcagtggtatcaacgcagagtacnngtgaggaannaggagtcanntttttttttttttttttttttttttttttt

SEQ ID NO: 2331 - DNA, 84 bp, Artificial
  Barcode component
  misc_feature (33)..(34): n is a, c, g, or t
  misc_feature (43)..(44): n is a, c, g, or t
  misc_feature (53)..(54): n is a, c, g, or t
tttttttaagcagtggtatcaacgcagagtacnngtgaggaanncgtgttacnntttttttttttttttttttttttttttttt

SEQ ID NO: 2332 - DNA, 84 bp, Artificial
  Barcode component
  misc_feature (33)..(34): n is a, c, g, or t
  misc_feature (43)..(44): n is a, c, g, or t
  misc_feature (53)..(54): n is a, c, g, or t
tttttttaagcagtggtatcaacgcagagtacnngtgaggaanntagtgtgcnntttttttttttttttttttttttttttttt

SEQ ID NO: 2333 - DNA, 84 bp, Artificial
  Barcode component
  misc_feature (33)..(34): n is a, c, g, or t
  misc_feature (43)..(44): n is a, c, g, or t
  misc_feature (53)..(54): n is a, c, g, or t
tttttttaagcagtggtatcaacgcagagtacnngtgaggaannctcatgacnntttttttttttttttttttttttttttttt

SEQ ID NO: 2334 - DNA, 84 bp, Artificial
  Barcode component
  misc_feature (33)..(34): n is a, c, g, or t
  misc_feature (43)..(44): n is a, c, g, or t
  misc_feature (53)..(54): n is a, c, g, or t
tttttttaagcagtggtatcaacgcagagtacnngtgaggaanngtatccagnntttttttttttttttttttttttttttttt

SEQ ID NO: 2335 - DNA, 84 bp, Artificial
  Barcode component
  misc_feature (33)..(34): n is a, c, g, or t
  misc_feature (43)..(44): n is a, c, g, or t
  misc_feature (53)..(54): n is a, c, g, or t
tttttttaagcagtggtatcaacgcagagtacnngtgaggaannacgcctatnntttttttttttttttttttttttttttttt

SEQ ID NO: 2336 - DNA, 84 bp, Artificial
  Barcode component
  misc_feature (33)..(34): n is a, c, g, or t
  misc_feature (43)..(44): n is a, c, g, or t
  misc_feature (53)..(54): n is a, c, g, or t
tttttttaagcagtggtatcaacgcagagtacnngtgaggaannaacgacctnntttttttttttttttttttttttttttttt

SEQ ID NO: 2337 - DNA, 84 bp, Artificial
  Barcode component
  misc_feature (33)..(34): n is a, c, g, or t
  misc_feature (43)..(44): n is a, c, g, or t
  misc_feature (53)..(54): n is a, c, g, or t
tttttttaagcagtggtatcaacgcagagtacnngtgaggaannatcaggctnntttttttttttttttttttttttttttttt

SEQ ID NO: 2338 - DNA, 84 bp, Artificial
  Barcode component
  misc_feature (33)..(34): n is a, c, g, or t
  misc_feature (43)..(44): n is a, c, g, or t
  misc_feature (53)..(54): n is a, c, g, or t
tttttttaagcagtggtatcaacgcagagtacnngtgaggaanncaagttcgnntttttttttttttttttttttttttttttt

SEQ ID NO: 2339 - DNA, 84 bp, Artificial
  Barcode component
  misc_feature (33)..(34): n is a, c, g, or t
  misc_feature (43)..(44): n is a, c, g, or t
  misc_feature (53)..(54): n is a, c, g, or t
tttttttaagcagtggtatcaacgcagagtacnngtgaggaanntagccaganntttttttttttttttttttttttttttttt

SEQ ID NO: 2340 - DNA, 84 bp, Artificial
  Barcode component
  misc_feature (33)..(34): n is a, c, g, or t
  misc_feature (43)..(44): n is a, c, g, or t
  misc_feature (53)..(54): n is a, c, g, or t
tttttttaagcagtggtatcaacgcagagtacnngtgaggaanncaatcacgnntttttttttttttttttttttttttttttt

SEQ ID NO: 2341 - DNA, 84 bp, Artificial
  Barcode component
  misc_feature (33)..(34): n is a, c, g, or t
  misc_feature (43)..(44): n is a, c, g, or t
  misc_feature (53)..(54): n is a, c, g, or t
tttttttaagcagtggtatcaacgcagagtacnngtgaggaanngcaacaagnntttttttttttttttttttttttttttttt

SEQ ID NO: 2342 - DNA, 84 bp, Artificial
  Barcode component
  misc_feature (33)..(34): n is a, c, g, or t
  misc_feature (43)..(44): n is a, c, g, or t
  misc_feature (53)..(54): n is a, c, g, or t
tttttttaagcagtggtatcaacgcagagtacnngtgaggaanncacgacaanntttttttttttttttttttttttttttttt

SEQ ID NO: 2343 - DNA, 84 bp, Artificial
  Barcode component
  misc_feature (33)..(34): n is a, c, g, or t
  misc_feature (43)..(44): n is a, c, g, or t
  misc_feature (53)..(54): n is a, c, g, or t
tttttttaagcagtggtatcaacgcagagtacnngtgaggaanntacggaganntttttttttttttttttttttttttttttt

SEQ ID NO: 2344 - DNA, 84 bp, Artificial
  Barcode component
  misc_feature (33)..(34): n is a, c, g, or t
  misc_feature (43)..(44): n is a, c, g, or t
  misc_feature (53)..(54): n is a, c, g, or t
tttttttaagcagtggtatcaacgcagagtacnngtgaggaanncgacaaganntttttttttttttttttttttttttttttt

SEQ ID NO: 2345 - DNA, 84 bp, Artificial
  Barcode component
  misc_feature (33)..(34): n is a, c, g, or t
  misc_feature (43)..(44): n is a, c, g, or t
  misc_feature (53)..(54): n is a, c, g, or t
tttttttaagcagtggtatcaacgcagagtacnngtgaggaanncgaagtganntttttttttttttttttttttttttttttt

SEQ ID NO: 2346 - DNA, 84 bp, Artificial
  Barcode component
  misc_feature (33)..(34): n is a, c, g, or t
  misc_feature (43)..(44): n is a, c, g, or t
  misc_feature (53)..(54): n is a, c, g, or t
tttttttaagcagtggtatcaacgcagagtacnngtgaggaannagctggtanntttttttttttttttttttttttttttttt

SEQ ID NO: 2347 - DNA, 84 bp, Artificial
  Barcode component
  misc_feature (33)..(34): n is a, c, g, or t
  misc_feature (43)..(44): n is a, c, g, or t
  misc_feature (53)..(54): n is a, c, g, or t
tttttttaagcagtggtatcaacgcagagtacnngtgaggaannaactaggcnntttttttttttttttttttttttttttttt

SEQ ID NO: 2348 - DNA, 84 bp, Artificial
  Barcode component
  misc_feature (33)..(34): n is a, c, g, or t
  misc_feature (43)..(44): n is a, c, g, or t
  misc_feature (53)..(54): n is a, c, g, or t
tttttttaagcagtggtatcaacgcagagtacnngtgaggaanncagcaagtnntttttttttttttttttttttttttttttt

SEQ ID NO: 2349 - DNA, 84 bp, Artificial
  Barcode component
  misc_feature (33)..(34): n is a, c, g, or t
  misc_feature (43)..(44): n is a, c, g, or t
  misc_feature (53)..(54): n is a, c, g, or t
tttttttaagcagtggtatcaacgcagagtacnngtgaggaannacgaggtanntttttttttttttttttttttttttttttt

SEQ ID NO: 2350 - DNA, 84 bp, Artificial
  Barcode component
  misc_feature (33)..(34): n is a, c, g, or t
  misc_feature (43)..(44): n is a, c, g, or t
  misc_feature (53)..(54): n is a, c, g, or t
tttttttaagcagtggtatcaacgcagagtacnngtgaggaanncatcttccnntttttttttttttttttttttttttttttt

SEQ ID NO: 2351 - DNA, 84 bp, Artificial
  Barcode component
  misc_feature (33)..(34): n is a, c, g, or t
  misc_feature (43)..(44): n is a, c, g, or t
  misc_feature (53)..(54): n is a, c, g, or t
tttttttaagcagtggtatcaacgcagagtacnngtgaggaanncctgaatcnntttttttttttttttttttttttttttttt

SEQ ID NO: 2352 - DNA, 84 bp, Artificial
  Barcode component
  misc_feature (33)..(34): n is a, c, g, or t
  misc_feature (43)..(44): n is a, c, g, or t
  misc_feature (53)..(54): n is a, c, g, or t
tttttttaagcagtggtatcaacgcagagtacnngtgaggaanntgcagactnntttttttttttttttttttttttttttttt

SEQ ID NO: 2353 - DNA, 84 bp, Artificial
  Barcode component
  misc_feature (33)..(34): n is a, c, g, or t
  misc_feature (43)..(44): n is a, c, g, or t
  misc_feature (53)..(54): n is a, c, g, or t
tttttttaagcagtggtatcaacgcagagtacnngtgaggaannagatgtggnntttttttttttttttttttttttttttttt

SEQ ID NO: 2354 - DNA, 84 bp, Artificial
  Barcode component
  misc_feature (33)..(34): n is a, c, g, or t
  misc_feature (43)..(44): n is a, c, g, or t
  misc_feature (53)..(54): n is a, c, g, or t
tttttttaagcagtggtatcaacgcagagtacnngtgaggaannagttcgacnntttttttttttttttttttttttttttttt

SEQ ID NO: 2355 - DNA, 84 bp, Artificial
  Barcode component
  misc_feature (33)..(34): n is a, c, g, or t
  misc_feature (43)..(44): n is a, c, g, or t
  misc_feature (53)..(54): n is a, c, g, or t
tttttttaagcagtggtatcaacgcagagtacnngtgaggaannacaacctcnntttttttttttttttttttttttttttttt

SEQ ID NO: 2356 - DNA, 84 bp, Artificial
  Barcode component
  misc_feature (33)..(34): n is a, c, g, or t
  misc_feature (43)..(44): n is a, c, g, or t
  misc_feature (53)..(54): n is a, c, g, or t
tttttttaagcagtggtatcaacgcagagtacnngtgaggaanncatggtagnntttttttttttttttttttttttttttttt

SEQ ID NO: 2357 - DNA, 84 bp, Artificial
  Barcode component
  misc_feature (33)..(34): n is a, c, g, or t
  misc_feature (43)..(44): n is a, c, g, or t
  misc_feature (53)..(54): n is a, c, g, or t
tttttttaagcagtggtatcaacgcagagtacnngtgaggaanncgtatctcnntttttttttttttttttttttttttttttt

SEQ ID NO: 2358 - DNA, 84 bp, Artificial
  Barcode component
  misc_feature (33)..(34): n is a, c, g, or t
  misc_feature (43)..(44): n is a, c, g, or t
  misc_feature (53)..(54): n is a, c, g, or t
tttttttaagcagtggtatcaacgcagagtacnngtgaggaanncctagttcnntttttttttttttttttttttttttttttt

SEQ ID NO: 2359 - DNA, 84 bp, Artificial
  Barcode component
  misc_feature (33)..(34): n is a, c, g, or t
  misc_feature (43)..(44): n is a, c, g, or t
  misc_feature (53)..(54): n is a, c, g, or t
tttttttaagcagtggtatcaacgcagagtacnngtgaggaanncaagagtcnntttttttttttttttttttttttttttttt

SEQ ID NO: 2360 - DNA, 84 bp, Artificial
  Barcode component
  misc_feature (33)..(34): n is a, c, g, or t
  misc_feature (43)..(44): n is a, c, g, or t
  misc_feature (53)..(54): n is a, c, g, or t
tttttttaagcagtggtatcaacgcagagtacnnaggagatgnnaatcggcanntttttttttttttttttttttttttttttt

SEQ ID NO: 2361 - DNA, 84 bp, Artificial
  Barcode component
  misc_feature (33)..(34): n is a, c, g, or t
  misc_feature (43)..(44): n is a, c, g, or t
  misc_feature (53)..(54): n is a, c, g, or t
tttttttaagcagtggtatcaacgcagagtacnnaggagatgnntacggcatnntttttttttttttttttttttttttttttt

SEQ ID NO: 2362 - DNA, 84 bp, Artificial
  Barcode component
  misc_feature (33)..(34): n is a, c, g, or t
  misc_feature (43)..(44): n is a, c, g, or t
  misc_feature (53)..(54): n is a, c, g, or t
tttttttaagcagtggtatcaacgcagagtacnnaggagatgnnttggatcgnntttttttttttttttttttttttttttttt

SEQ ID NO: 2363 - DNA, 84 bp, Artificial
  Barcode component
  misc_feature (33)..(34): n is a, c, g, or t
  misc_feature (43)..(44): n is a, c, g, or t
  misc_feature (53)..(54): n is a, c, g, or t
tttttttaagcagtggtatcaacgcagagtacnnaggagatgnntggaacganntttttttttttttttttttttttttttttt

SEQ ID NO: 2364 - DNA, 84 bp, Artificial
  Barcode component
  misc_feature (33)..(34): n is a, c, g, or t
  misc_feature (43)..(44): n is a, c, g, or t
  misc_feature (53)..(54): n is a, c, g, or t
tttttttaagcagtggtatcaacgcagagtacnnaggagatgnnggcaatcanntttttttttttttttttttttttttttttt

SEQ ID NO: 2365 - DNA, 84 bp, Artificial
  Barcode component
  misc_feature (33)..(34): n is a, c, g, or t
  misc_feature (43)..(44): n is a, c, g, or t
  misc_feature (53)..(54): n is a, c, g, or t
tttttttaagcagtggtatcaacgcagagtacnnaggagatgnngaatccganntttttttttttttttttttttttttttttt

SEQ ID NO: 2366 - DNA, 84 bp, Artificial
  Barcode component
  misc_feature (33)..(34): n is a, c, g, or t
  misc_feature (43)..(44): n is a, c, g, or t
  misc_feature (53)..(54): n is a, c, g, or t
tttttttaagcagtggtatcaacgcagagtacnnaggagatgnnttacggtgnntttttttttttttttttttttttttttttt

SEQ ID NO: 2367 - DNA, 84 bp, Artificial
  Barcode component
  misc_feature (33)..(34): n is a, c, g, or t
  misc_feature (43)..(44): n is a, c, g, or t
  misc_feature (53)..(54): n is a, c, g, or t
tttttttaagcagtggtatcaacgcagagtacnnaggagatgnncatatcggnntttttttttttttttttttttttttttttt

SEQ ID NO: 2368 - DNA, 84 bp, Artificial
  Barcode component
  misc_feature (33)..(34): n is a, c, g, or t
  misc_feature (43)..(44): n is a, c, g, or t
  misc_feature (53)..(54): n is a, c, g, or t
tttttttaagcagtggtatcaacgcagagtacnnaggagatgnncttcggtanntttttttttttttttttttttttttttttt

SEQ ID NO: 2369 - DNA, 84 bp, Artificial
  Barcode component
  misc_feature (33)..(34): n is a, c, g, or t
  misc_feature (43)..(44): n is a, c, g, or t
  misc_feature (53)..(54): n is a, c, g, or t
tttttttaagcagtggtatcaacgcagagtacnnaggagatgnntcctaacgnntttttttttttttttttttttttttttttt

SEQ ID NO: 2370 - DNA, 84 bp, Artificial
  Barcode component
  misc_feature (33)..(34): n is a, c, g, or t
  misc_feature (43)..(44): n is a, c, g, or t
  misc_feature (53)..(54): n is a, c, g, or t
tttttttaagcagtggtatcaacgcagagtacnnaggagatgnngtaagccanntttttttttttttttttttttttttttttt

SEQ ID NO: 2371 - DNA, 84 bp, Artificial
  Barcode component
  misc_feature (33)..(34): n is a, c, g, or t
  misc_feature (43)..(44): n is a, c, g, or t
  misc_feature (53)..(54): n is a, c, g, or t
tttttttaagcagtggtatcaacgcagagtacnnaggagatgnntaaggtggnntttttttttttttttttttttttttttttt

SEQ ID NO: 2372 - DNA, 84 bp, Artificial
  Barcode component
  misc_feature (33)..(34): n is a, c, g, or t
  misc_feature (43)..(44): n is a, c, g, or t
  misc_feature (53)..(54): n is a, c, g, or t
tttttttaagcagtggtatcaacgcagagtacnnaggagatgnnggtaagctnntttttttttttttttttttttttttttttt

SEQ ID NO: 2373 - DNA, 84 bp, Artificial
  Barcode component
  misc_feature (33)..(34): n is a, c, g, or t
  misc_feature (43)..(44): n is a, c, g, or t
  misc_feature (53)..(54): n is a, c, g, or t
tttttttaagcagtggtatcaacgcagagtacnnaggagatgnntgtgtcganntttttttttttttttttttttttttttttt

SEQ ID NO: 2374 - DNA, 84 bp, Artificial
  Barcode component
  misc_feature (33)..(34): n is a, c, g, or t
  misc_feature (43)..(44): n is a, c, g, or t
  misc_feature (53)..(54): n is a, c, g, or t
tttttttaagcagtggtatcaacgcagagtacnnaggagatgnngagcatganntttttttttttttttttttttttttttttt

SEQ ID NO: 2375 - DNA, 84 bp, Artificial
  Barcode component
  misc_feature (33)..(34): n is a, c, g, or t
  misc_feature (43)..(44): n is a, c, g, or t
  misc_feature (53)..(54): n is a, c, g, or t
tttttttaagcagtggtatcaacgcagagtacnnaggagatgnntcgaagtcnntttttttttttttttttttttttttttttt

SEQ ID NO: 2376 - DNA, 84 bp, Artificial
  Barcode component
  misc_feature (33)..(34): n is a, c, g, or t
  misc_feature (43)..(44): n is a, c, g, or t
  misc_feature (53)..(54): n is a, c, g, or t
tttttttaagcagtggtatcaacgcagagtacnnaggagatgnnggtgaacanntttttttttttttttttttttttttttttt

SEQ ID NO: 2377 - DNA, 84 bp, Artificial
  Barcode component
  misc_feature (33)..(34): n is a, c, g, or t
  misc_feature (43)..(44): n is a, c, g, or t
  misc_feature (53)..(54): n is a, c, g, or t
tttttttaagcagtggtatcaacgcagagtacnnaggagatgnnacatgcacnntttttttttttttttttttttttttttttt

SEQ ID NO: 2378 - DNA, 84 bp, Artificial
  Barcode component
  misc_feature (33)..(34): n is a, c, g, or t
  misc_feature (43)..(44): n is a, c, g, or t
  misc_feature (53)..(54): n is a, c, g, or t
tttttttaagcagtggtatcaacgcagagtacnnaggagatgnnccaacagtnntttttttttttttttttttttttttttttt

SEQ ID NO: 2379 - DNA, 84 bp, Artificial
  Barcode component
  misc_feature (33)..(34): n is a, c, g, or t
  misc_feature (43)..(44): n is a, c, g, or t
  misc_feature (53)..(54): n is a, c, g, or t
tttttttaagcagtggtatcaacgcagagtacnnaggagatgnnagaacagcnntttttttttttttttttttttttttttttt

SEQ ID NO: 2380 - DNA, 84 bp, Artificial
  Barcode component
  misc_feature (33)..(34): n is a, c, g, or t
  misc_feature (43)..(44): n is a, c, g, or t
  misc_feature (53)..(54): n is a, c, g, or t
tttttttaagcagtggtatcaacgcagagtacnnaggagatgnngaacacgtnntttttttttttttttttttttttttttttt

SEQ ID NO: 2381 - DNA, 84 bp, Artificial
  Barcode component
  misc_feature (33)..(34): n is a, c, g, or t
  misc_feature (43)..(44): n is a, c, g, or t
  misc_feature (53)..(54): n is a, c, g, or t
tttttttaagcagtggtatcaacgcagagtacnnaggagatgnnggtcttcanntttttttttttttttttttttttttttttt

SEQ ID NO: 2382 - DNA, 84 bp, Artificial
  Barcode component
  misc_feature (33)..(34): n is a, c, g, or t
  misc_feature (43)..(44): n is a, c, g, or t
  misc_feature (53)..(54): n is a, c, g, or t
tttttttaagcagtggtatcaacgcagagtacnnaggagatgnnaggttcagnntttttttttttttttttttttttttttttt

SEQ ID NO: 2383 - DNA, 84 bp, Artificial
  Barcode component
  misc_feature (33)..(34): n is a, c, g, or t
  misc_feature (43)..(44): n is a, c, g, or t
  misc_feature (53)..(54): n is a, c, g, or t
tttttttaagcagtggtatcaacgcagagtacnnaggagatgnnctagagcanntttttttttttttttttttttttttttttt

SEQ ID NO: 2384 - DNA, 84 bp, Artificial
  Barcode component
  misc_feature (33)..(34): n is a, c, g, or t
  misc_feature (43)..(44): n is a, c, g, or t
  misc_feature (53)..(54): n is a, c, g, or t
tttttttaagcagtggtatcaacgcagagtacnnaggagatgnncttctagcnntttttttttttttttttttttttttttttt

SEQ ID NO: 2385 - DNA, 84 bp, Artificial
  Barcode component
  misc_feature (33)..(34): n is a, c, g, or t
  misc_feature (43)..(44): n is a, c, g, or t
  misc_feature (53)..(54): n is a, c, g, or t
tttttttaagcagtggtatcaacgcagagtacnnaggagatgnngagtaacgnntttttttttttttttttttttttttttttt

SEQ ID NO: 2386 - DNA, 84 bp, Artificial
  Barcode component
  misc_feature (33)..(34): n is a, c, g, or t
  misc_feature (43)..(44): n is a, c, g, or t
  misc_feature (53)..(54): n is a, c, g, or t
tttttttaagcagtggtatcaacgcagagtacnnaggagatgnnctaagaggnntttttttttttttttttttttttttttttt

SEQ ID NO: 2387 - DNA, 84 bp, Artificial
  Barcode component
  misc_feature (33)..(34): n is a, c, g, or t
  misc_feature (43)..(44): n is a, c, g, or t
  misc_feature (53)..(54): n is a, c, g, or t
tttttttaagcagtggtatcaacgcagagtacnnaggagatgnnacgtgtagnntttttttttttttttttttttttttttttt

SEQ ID NO: 2388 - DNA, 84 bp, Artificial
  Barcode component
  misc_feature (33)..(34): n is a, c, g, or t
  misc_feature (43)..(44): n is a, c, g, or t
  misc_feature (53)..(54): n is a, c, g, or t
tttttttaagcagtggtatcaacgcagagtacnnaggagatgnnactacaggnntttttttttttttttttttttttttttttt

SEQ ID NO: 2389 - DNA, 84 bp, Artificial
  Barcode component
  misc_feature (33)..(34): n is a, c, g, or t
  misc_feature (43)..(44): n is a, c, g, or t
  misc_feature (53)..(54): n is a, c, g, or t
tttttttaagcagtggtatcaacgcagagtacnnaggagatgnntacaggtcnntttttttttttttttttttttttttttttt

SEQ ID NO: 2390 - DNA, 84 bp, Artificial
  Barcode component
  misc_feature (33)..(34): n is a, c, g, or t
  misc_feature (43)..(44): n is a, c, g, or t
  misc_feature (53)..(54): n is a, c, g, or t
tttttttaagcagtggtatcaacgcagagtacnnaggagatgnnctcacatgnntttttttttttttttttttttttttttttt

SEQ ID NO: 2391 - DNA, 84 bp, Artificial
  Barcode component
  misc_feature (33)..(34): n is a, c, g, or t
  misc_feature (43)..(44): n is a, c, g, or t
  misc_feature (53)..(54): n is a, c, g, or t
tttttttaagcagtggtatcaacgcagagtacnnaggagatgnnactaggagnntttttttttttttttttttttttttttttt

SEQ ID NO: 2392 - DNA, 84 bp, Artificial
  Barcode component
  misc_feature (33)..(34): n is a, c, g, or t
  misc_feature (43)..(44): n is a, c, g, or t
  misc_feature (53)..(54): n is a, c, g, or t
tttttttaagcagtggtatcaacgcagagtacnnaggagatgnnccatagganntttttttttttttttttttttttttttttt

SEQ ID NO: 2393 - DNA, 84 bp, Artificial
  Barcode component
  misc_feature (33)..(34): n is a, c, g, or t
  misc_feature (43)..(44): n is a, c, g, or t
  misc_feature (53)..(54): n is a, c, g, or t
tttttttaagcagtggtatcaacgcagagtacnnaggagatgnnggagaatcnntttttttttttttttttttttttttttttt

SEQ ID NO: 2394 - DNA, 84 bp, Artificial
  Barcode component
  misc_feature (33)..(34): n is a, c, g, or t
  misc_feature (43)..(44): n is a, c, g, or t
  misc_feature (53)..(54): n is a, c, g, or t
tttttttaagcagtggtatcaacgcagagtacnnaggagatgnngccaagaanntttttttttttttttttttttttttttttt

SEQ ID NO: 2395 - DNA, 84 bp, Artificial
  Barcode component
  misc_feature (33)..(34): n is a, c, g, or t
  misc_feature (43)..(44): n is a, c, g, or t
  misc_feature (53)..(54): n is a, c, g, or t
tttttttaagcagtggtatcaacgcagagtacnnaggagatgnnaaggcaagnntttttttttttttttttttttttttttttt

SEQ ID NO: 2396 - DNA, 84 bp, Artificial
  Barcode component
  misc_feature (33)..(34): n is a, c, g, or t
  misc_feature (43)..(44): n is a, c, g, or t
  misc_feature (53)..(54): n is a, c, g, or t
tttttttaagcagtggtatcaacgcagagtacnnaggagatgnnaatgtcgcnntttttttttttttttttttttttttttttt

SEQ ID NO: 2397 - DNA, 84 bp, Artificial
  Barcode component
  misc_feature (33)..(34): n is a, c, g, or t
  misc_feature (43)..(44): n is a, c, g, or t
  misc_feature (53)..(54): n is a, c, g, or t
tttttttaagcagtggtatcaacgcagagtacnnaggagatgnnatggaaccnntttttttttttttttttttttttttttttt

SEQ ID NO: 2398 - DNA, 84 bp, Artificial
  Barcode component
  misc_feature (33)..(34): n is a, c, g, or t
  misc_feature (43)..(44): n is a, c, g, or t
  misc_feature (53)..(54): n is a, c, g, or t
tttttttaagcagtggtatcaacgcagagtacnnaggagatgnnagaggcatnntttttttttttttttttttttttttttttt

SEQ ID NO: 2399 - DNA, 84 bp, Artificial
  Barcode component
  misc_feature (33)..(34): n is a, c, g, or t
  misc_feature (43)..(44): n is a, c, g, or t
  misc_feature (53)..(54): n is a, c, g, or t
tttttttaagcagtggtatcaacgcagagtacnnaggagatgnntgcatagcnntttttttttttttttttttttttttttttt

SEQ ID NO: 2400 - DNA, 84 bp, Artificial
  Barcode component
  misc_feature (33)..(34): n is a, c, g, or t
  misc_feature (43)..(44): n is a, c, g, or t
  misc_feature (53)..(54): n is a, c, g, or t
tttttttaagcagtggtatcaacgcagagtacnnaggagatgnnctaacgganntttttttttttttttttttttttttttttt

SEQ ID NO: 2401 - DNA, 84 bp, Artificial
  Barcode component
  misc_feature (33)..(34): n is a, c, g, or t
  misc_feature (43)..(44): n is a, c, g, or t
  misc_feature (53)..(54): n is a, c, g, or t
tttttttaagcagtggtatcaacgcagagtacnnaggagatgnntatcgaggnntttttttttttttttttttttttttttttt

SEQ ID NO: 2402 - DNA, 84 bp, Artificial
  Barcode component
  misc_feature (33)..(34): n is a, c, g, or t
  misc_feature (43)..(44): n is a, c, g, or t
  misc_feature (53)..(54): n is a, c, g, or t
tttttttaagcagtggtatcaacgcagagtacnnaggagatgnncatagcctnntttttttttttttttttttttttttttttt

SEQ ID NO: 2403 - DNA, 84 bp, Artificial
  Barcode component
  misc_feature (33)..(34): n is a, c, g, or t
  misc_feature (43)..(44): n is a, c, g, or t
  misc_feature (53)..(54): n is a, c, g, or t
tttttttaagcagtggtatcaacgcagagtacnnaggagatgnnatcgagacnntttttttttttttttttttttttttttttt

SEQ ID NO: 2404 - DNA, 84 bp, Artificial
  Barcode component
  misc_feature (33)..(34): n is a, c, g, or t
  misc_feature (43)..(44): n is a, c, g, or t
  misc_feature (53)..(54): n is a, c, g, or t
tttttttaagcagtggtatcaacgcagagtacnnaggagatgnnggaagagtnntttttttttttttttttttttttttttttt

SEQ ID NO: 2405 - DNA, 84 bp, Artificial
  Barcode component
  misc_feature (33)..(34): n is a, c, g, or t
  misc_feature (43)..(44): n is a, c, g, or t
  misc_feature (53)..(54): n is a, c, g, or t
tttttttaagcagtggtatcaacgcagagtacnnaggagatgnnccaagtagnntttttttttttttttttttttttttttttt

SEQ ID NO: 2406 - DNA, 84 bp, Artificial
  Barcode component
  misc_feature (33)..(34): n is a, c, g, or t
  misc_feature (43)..(44): n is a, c, g, or t
  misc_feature (53)..(54): n is a, c, g, or t
tttttttaagcagtggtatcaacgcagagtacnnaggagatgnnctgaacagnntttttttttttttttttttttttttttttt

SEQ ID NO: 2407 - DNA, 84 bp, Artificial
  Barcode component
  misc_feature (33)..(34): n is a, c, g, or t
  misc_feature (43)..(44): n is a, c, g, or t
  misc_feature (53)..(54): n is a, c, g, or t
tttttttaagcagtggtatcaacgcagagtacnnaggagatgnngtaggttcnntttttttttttttttttttttttttttttt

SEQ ID NO: 2408 - DNA, 84 bp, Artificial
  Barcode component
  misc_feature (33)..(34): n is a, c, g, or t
  misc_feature (43)..(44): n is a, c, g, or t
  misc_feature (53)..(54): n is a, c, g, or t
tttttttaagcagtggtatcaacgcagagtacnnaggagatgnngtatggacnntttttttttttttttttttttttttttttt

SEQ ID NO: 2409 - DNA, 84 bp, Artificial
  Barcode component
  misc_feature (33)..(34): n is a, c, g, or t
  misc_feature (43)..(44): n is a, c, g, or t
  misc_feature (53)..(54): n is a, c, g, or t
tttttttaagcagtggtatcaacgcagagtacnnaggagatgnntcgcaacanntttttttttttttttttttttttttttttt

SEQ ID NO: 2410 - DNA, 84 bp, Artificial
  Barcode component
  misc_feature (33)..(34): n is a, c, g, or t
  misc_feature (43)..(44): n is a, c, g, or t
  misc_feature (53)..(54): n is a, c, g, or t
tttttttaagcagtggtatcaacgcagagtacnnaggagatgnnccgctaatnntttttttttttttttttttttttttttttt

SEQ ID NO: 2411 - DNA, 84 bp, Artificial
  Barcode component
  misc_feature (33)..(34): n is a, c, g, or t
  misc_feature (43)..(44): n is a, c, g, or t
  misc_feature (53)..(54): n is a, c, g, or t
tttttttaagcagtggtatcaacgcagagtacnnaggagatgnngattcgcanntttttttttttttttttttttttttttttt

SEQ ID NO: 2412 - DNA, 84 bp, Artificial
  Barcode component
  misc_feature (33)..(34): n is a, c, g, or t
  misc_feature (43)..(44): n is a, c, g, or t
  misc_feature (53)..(54): n is a, c, g, or t
tttttttaagcagtggtatcaacgcagagtacnnaggagatgnncgatggaanntttttttttttttttttttttttttttttt

SEQ ID NO: 2413 - DNA, 84 bp, Artificial
  Barcode component
  misc_feature (33)..(34): n is a, c, g, or t
  misc_feature (43)..(44): n is a, c, g, or t
  misc_feature (53)..(54): n is a, c, g, or t
tttttttaagcagtggtatcaacgcagagtacnnaggagatgnnagcaagganntttttttttttttttttttttttttttttt

SEQ ID NO: 2414 - DNA, 84 bp, Artificial
  Barcode component
  misc_feature (33)..(34): n is a, c, g, or t
  misc_feature (43)..(44): n is a, c, g, or t
  misc_feature (53)..(54): n is a, c, g, or t
tttttttaagcagtggtatcaacgcagagtacnnaggagatgnncgtagcaanntttttttttttttttttttttttttttttt

SEQ ID NO: 2415 - DNA, 84 bp, Artificial
  Barcode component
  misc_feature (33)..(34): n is a, c, g, or t
  misc_feature (43)..(44): n is a, c, g, or t
  misc_feature (53)..(54): n is a, c, g, or t
tttttttaagcagtggtatcaacgcagagtacnnaggagatgnntggcagtanntttttttttttttttttttttttttttttt

SEQ ID NO: 2416 - DNA, 84 bp, Artificial
  Barcode component
  misc_feature (33)..(34): n is a, c, g, or t
  misc_feature (43)..(44): n is a, c, g, or t
  misc_feature (53)..(54): n is a, c, g, or t
tttttttaagcagtggtatcaacgcagagtacnnaggagatgnncggtagttnntttttttttttttttttttttttttttttt

SEQ ID NO: 2417 - DNA, 84 bp, Artificial
  Barcode component
  misc_feature (33)..(34): n is a, c, g, or t
  misc_feature (43)..(44): n is a, c, g, or t
  misc_feature (53)..(54): n is a, c, g, or t
tttttttaagcagtggtatcaacgcagagtacnnaggagatgnntgacttcgnntttttttttttttttttttttttttttttt

SEQ ID NO: 2418 - DNA, 84 bp, Artificial
  Barcode component
  misc_feature (33)..(34): n is a, c, g, or t
  misc_feature (43)..(44): n is a, c, g, or t
  misc_feature (53)..(54): n is a, c, g, or t
tttttttaagcagtggtatcaacgcagagtacnnaggagatgnngagtgcaanntttttttttttttttttttttttttttttt

SEQ ID NO: 2419 - DNA, 84 bp, Artificial
  Barcode component
  misc_feature (33)..(34): n is a, c, g, or t
  misc_feature (43)..(44): n is a, c, g, or t
  misc_feature (53)..(54): n is a, c, g, or t
tttttttaagcagtggtatcaacgcagagtacnnaggagatgnnacggtaacnntttttttttttttttttttttttttttttt

SEQ ID NO: 2420 - DNA, 84 bp, Artificial
  Barcode component
  misc_feature (33)..(34): n is a, c, g, or t
  misc_feature (43)..(44): n is a, c, g, or t
  misc_feature (53)..(54): n is a, c, g, or t
tttttttaagcagtggtatcaacgcagagtacnnaggagatgnnaagtggtgnntttttttttttttttttttttttttttttt

SEQ ID NO: 2421 - DNA, 84 bp, Artificial
  Barcode component
  misc_feature (33)..(34): n is a, c, g, or t
  misc_feature (43)..(44): n is a, c, g, or t
  misc_feature (53)..(54): n is a, c, g, or t
tttttttaagcagtggtatcaacgcagagtacnnaggagatgnnggagacaanntttttttttttttttttttttttttttttt

SEQ ID NO: 2422 - DNA, 84 bp, Artificial
  Barcode component
  misc_feature (33)..(34): n is a, c, g, or t
  misc_feature (43)..(44): n is a, c, g, or t
  misc_feature (53)..(54): n is a, c, g, or t
tttttttaagcagtggtatcaacgcagagtacnnaggagatgnntcaaggacnntttttttttttttttttttttttttttttt

SEQ ID NO: 2423 - DNA, 84 bp, Artificial
  Barcode component
  misc_feature (33)..(34): n is a, c, g, or t
  misc_feature (43)..(44): n is a, c, g, or t
  misc_feature (53)..(54): n is a, c, g, or t
tttttttaagcagtggtatcaacgcagagtacnnaggagatgnnaagagagcnntttttttttttttttttttttttttttttt

SEQ ID NO: 2424 - DNA, 84 bp, Artificial
  Barcode component
  misc_feature (33)..(34): n is a, c, g, or t
  misc_feature (43)..(44): n is a, c, g, or t
  misc_feature (53)..(54): n is a, c, g, or t
tttttttaagcagtggtatcaacgcagagtacnnaggagatgnncgagagatnntttttttttttttttttttttttttttttt

SEQ ID NO: 2425 - DNA, 84 bp, Artificial
  Barcode component
  misc_feature (33)..(34): n is a, c, g, or t
  misc_feature (43)..(44): n is a, c, g, or t
  misc_feature (53)..(54): n is a, c, g, or t
tttttttaagcagtggtatcaacgcagagtacnnaggagatgnnacagatggnntttttttttttttttttttttttttttttt

SEQ ID NO: 2426 - DNA, 84 bp, Artificial
  Barcode component
  misc_feature (33)..(34): n is a, c, g, or t
  misc_feature (43)..(44): n is a, c, g, or t
  misc_feature (53)..(54): n is a, c, g, or t
tttttttaagcagtggtatcaacgcagagtacnnaggagatgnnaggagtcanntttttttttttttttttttttttttttttt

SEQ ID NO: 2427 - DNA, 84 bp, Artificial
  Barcode component
  misc_feature (33)..(34): n is a, c, g, or t
  misc_feature (43)..(44): n is a, c, g, or t
  misc_feature (53)..(54): n is a, c, g, or t
tttttttaagcagtggtatcaacgcagagtacnnaggagatgnncgtgttacnntttttttttttttttttttttttttttttt

SEQ ID NO: 2428 - DNA, 84 bp, Artificial
  Barcode component
  misc_feature (33)..(34): n is a, c, g, or t
  misc_feature (43)..(44): n is a, c, g, or t
  misc_feature (53)..(54): n is a, c, g, or t
tttttttaagcagtggtatcaacgcagagtacnnaggagatgnntagtgtgcnntttttttttttttttttttttttttttttt

SEQ ID NO: 2429 - DNA, 84 bp, Artificial
  Barcode component
  misc_feature (33)..(34): n is a, c, g, or t
  misc_feature (43)..(44): n is a, c, g, or t
  misc_feature (53)..(54): n is a, c, g, or t
tttttttaagcagtggtatcaacgcagagtacnnaggagatgnnctcatgacnntttttttttttttttttttttttttttttt

SEQ ID NO: 2430 - DNA, 84 bp, Artificial
  Barcode component
  misc_feature (33)..(34): n is a, c, g, or t
  misc_feature (43)..(44): n is a, c, g, or t
  misc_feature (53)..(54): n is a, c, g, or t
tttttttaagcagtggtatcaacgcagagtacnnaggagatgnngtatccagnntttttttttttttttttttttttttttttt

SEQ ID NO: 2431 - DNA, 84 bp, Artificial
  Barcode component
  misc_feature (33)..(34): n is a, c, g, or t
  misc_feature (43)..(44): n is a, c, g, or t
  misc_feature (53)..(54): n is a, c, g, or t
tttttttaagcagtggtatcaacgcagagtacnnaggagatgnnacgcctatnntttttttttttttttttttttttttttttt

SEQ ID NO: 2432 - DNA, 84 bp, Artificial
  Barcode component
  misc_feature (33)..(34): n is a, c, g, or t
  misc_feature (43)..(44): n is a, c, g, or t
  misc_feature (53)..(54): n is a, c, g, or t
tttttttaagcagtggtatcaacgcagagtacnnaggagatgnnaacgacctnntttttttttttttttttttttttttttttt

SEQ ID NO: 2433 - DNA, 84 bp, Artificial
  Barcode component
  misc_feature (33)..(34): n is a, c, g, or t
  misc_feature (43)..(44): n is a, c, g, or t
  misc_feature (53)..(54): n is a, c, g, or t
tttttttaagcagtggtatcaacgcagagtacnnaggagatgnnatcaggctnntttttttttttttttttttttttttttttt

SEQ ID NO: 2434 - DNA, 84 bp, Artificial
  Barcode component
  misc_feature (33)..(34): n is a, c, g, or t
  misc_feature (43)..(44): n is a, c, g, or t
  misc_feature (53)..(54): n is a, c, g, or t
tttttttaagcagtggtatcaacgcagagtacnnaggagatgnncaagttcgnntttttttttttttttttttttttttttttt

SEQ ID NO: 2435 - DNA, 84 bp, Artificial
  Barcode component
  misc_feature (33)..(34): n is a, c, g, or t
  misc_feature (43)..(44): n is a, c, g, or t
  misc_feature (53)..(54): n is a, c, g, or t
tttttttaagcagtggtatcaacgcagagtacnnaggagatgnntagccaganntttttttttttttttttttttttttttttt

SEQ ID NO: 2436 - DNA, 84 bp, Artificial
  Barcode component
  misc_feature (33)..(34): n is a, c, g, or t
  misc_feature (43)..(44): n is a, c, g, or t
  misc_feature (53)..(54): n is a, c, g, or t
tttttttaagcagtggtatcaacgcagagtacnnaggagatgnncaatcacgnntttttttttttttttttttttttttttttt

SEQ ID NO: 2437 - DNA, 84 bp, Artificial
  Barcode component
  misc_feature (33)..(34): n is a, c, g, or t
  misc_feature (43)..(44): n is a, c, g, or t
  misc_feature (53)..(54): n is a, c, g, or t
tttttttaagcagtggtatcaacgcagagtacnnaggagatgnngcaacaagnntttttttttttttttttttttttttttttt

SEQ ID NO: 2438 - DNA, 84 bp, Artificial
  Barcode component
  misc_feature (33)..(34): n is a, c, g, or t
  misc_feature (43)..(44): n is a, c, g, or t
  misc_feature (53)..(54): n is a, c, g, or t
tttttttaagcagtggtatcaacgcagagtacnnaggagatgnncacgacaanntttttttttttttttttttttttttttttt

SEQ ID NO: 2439 - DNA, 84 bp, Artificial
  Barcode component
  misc_feature (33)..(34): n is a, c, g, or t
  misc_feature (43)..(44): n is a, c, g, or t
  misc_feature (53)..(54): n is a, c, g, or t
tttttttaagcagtggtatcaacgcagagtacnnaggagatgnntacggaganntttttttttttttttttttttttttttttt

SEQ ID NO: 2440 - DNA, 84 bp, Artificial
  Barcode component
  misc_feature (33)..(34): n is a, c, g, or t
  misc_feature (43)..(44): n is a, c, g, or t
  misc_feature (53)..(54): n is a, c, g, or t
tttttttaagcagtggtatcaacgcagagtacnnaggagatgnncgacaaganntttttttttttttttttttttttttttttt

SEQ ID NO: 2441 - DNA, 84 bp, Artificial
  Barcode component
  misc_feature (33)..(34): n is a, c, g, or t
  misc_feature (43)..(44): n is a, c, g, or t
  misc_feature (53)..(54): n is a, c, g, or t
tttttttaagcagtggtatcaacgcagagtacnnaggagatgnncgaagtganntttttttttttttttttttttttttttttt

SEQ ID NO: 2442 - DNA, 84 bp, Artificial
  Barcode component
  misc_feature (33)..(34): n is a, c, g, or t
  misc_feature (43)..(44): n is a, c, g, or t
  misc_feature (53)..(54): n is a, c, g, or t
tttttttaagcagtggtatcaacgcagagtacnnaggagatgnnagctggtanntttttttttttttttttttttttttttttt

SEQ ID NO: 2443 - DNA, 84 bp, Artificial
  Barcode component
  misc_feature (33)..(34): n is a, c, g, or t
  misc_feature (43)..(44): n is a, c, g, or t
  misc_feature (53)..(54): n is a, c, g, or t
tttttttaagcagtggtatcaacgcagagtacnnaggagatgnnaactaggcnntttttttttttttttttttttttttttttt

SEQ ID NO: 2444 - DNA, 84 bp, Artificial
  Barcode component
  misc_feature (33)..(34): n is a, c, g, or t
  misc_feature (43)..(44): n is a, c, g, or t
  misc_feature (53)..(54): n is a, c, g, or t
tttttttaagcagtggtatcaacgcagagtacnnaggagatgnncagcaagtnntttttttttttttttttttttttttttttt

SEQ ID NO: 2445 - DNA, 84 bp, Artificial
  Barcode component
  misc_feature (33)..(34): n is a, c, g, or t
  misc_feature (43)..(44): n is a, c, g, or t
  misc_feature (53)..(54): n is a, c, g, or t
tttttttaagcagtggtatcaacgcagagtacnnaggagatgnnacgaggtanntttttttttttttttttttttttttttttt

SEQ ID NO: 2446 - DNA, 84 bp, Artificial
  Barcode component
  misc_feature (33)..(34): n is a, c, g, or t
  misc_feature (43)..(44): n is a, c, g, or t
  misc_feature (53)..(54): n is a, c, g, or t
tttttttaagcagtggtatcaacgcagagtacnnaggagatgnncatcttccnntttttttttttttttttttttttttttttt

SEQ ID NO: 2447 - DNA, 84 bp, Artificial
  Barcode component
  misc_feature (33)..(34): n is a, c, g, or t
  misc_feature (43)..(44): n is a, c, g, or t
  misc_feature (53)..(54): n is a, c, g, or t
tttttttaagcagtggtatcaacgcagagtacnnaggagatgnncctgaatcnntttttttttttttttttttttttttttttt

SEQ ID NO: 2448 - DNA, 84 bp, Artificial
  Barcode component
  misc_feature (33)..(34): n is a, c, g, or t
  misc_feature (43)..(44): n is a, c, g, or t
  misc_feature (53)..(54): n is a, c, g, or t
tttttttaagcagtggtatcaacgcagagtacnnaggagatgnntgcagactnntttttttttttttttttttttttttttttt

SEQ ID NO: 2449 - DNA, 84 bp, Artificial
  Barcode component
  misc_feature (33)..(34): n is a, c, g, or t
  misc_feature (43)..(44): n is a, c, g, or t
  misc_feature (53)..(54): n is a, c, g, or t
tttttttaagcagtggtatcaacgcagagtacnnaggagatgnnagatgtggnntttttttttttttttttttttttttttttt

SEQ ID NO: 2450 - DNA, 84 bp, Artificial
  Barcode component
  misc_feature (33)..(34): n is a, c, g, or t
  misc_feature (43)..(44): n is a, c, g, or t
  misc_feature (53)..(54): n is a, c, g, or t
tttttttaagcagtggtatcaacgcagagtacnnaggagatgnnagttcgacnntttttttttttttttttttttttttttttt

SEQ ID NO: 2451 - DNA, 84 bp, Artificial
  Barcode component
  misc_feature (33)..(34): n is a, c, g, or t
  misc_feature (43)..(44): n is a, c, g, or t
  misc_feature (53)..(54): n is a, c, g, or t
tttttttaagcagtggtatcaacgcagagtacnnaggagatgnnacaacctcnntttttttttttttttttttttttttttttt

SEQ ID NO: 2452 - DNA, 84 bp, Artificial
  Barcode component
  misc_feature (33)..(34): n is a, c, g, or t
  misc_feature (43)..(44): n is a, c, g, or t
  misc_feature (53)..(54): n is a, c, g, or t
tttttttaagcagtggtatcaacgcagagtacnnaggagatgnncatggtagnntttttttttttttttttttttttttttttt

SEQ ID NO: 2453 - DNA, 84 bp, Artificial
  Barcode component
  misc_feature (33)..(34): n is a, c, g, or t
  misc_feature (43)..(44): n is a, c, g, or t
  misc_feature (53)..(54): n is a, c, g, or t
tttttttaagcagtggtatcaacgcagagtacnnaggagatgnncgtatctcnntttttttttttttttttttttttttttttt

SEQ ID NO: 2454 - DNA, 84 bp, Artificial
  Barcode component
  misc_feature (33)..(34): n is a, c, g, or t
  misc_feature (43)..(44): n is a, c, g, or t
  misc_feature (53)..(54): n is a, c, g, or t
tttttttaagcagtggtatcaacgcagagtacnnaggagatgnncctagttcnntttttttttttttttttttttttttttttt

SEQ ID NO: 2455 - DNA, 84 bp, Artificial
  Barcode component
  misc_feature (33)..(34): n is a, c, g, or t
  misc_feature (43)..(44): n is a, c, g, or t
  misc_feature (53)..(54): n is a, c, g, or t
tttttttaagcagtggtatcaacgcagagtacnnaggagatgnncaagagtcnntttttttttttttttttttttttttttttt

SEQ ID NO: 2456 - DNA, 84 bp, Artificial
  Barcode component
  misc_feature (33)..(34): n is a, c, g, or t
  misc_feature (43)..(44): n is a, c, g, or t
  misc_feature (53)..(54): n is a, c, g, or t
tttttttaagcagtggtatcaacgcagagtacnnaaggcctannaatcggcanntttttttttttttttttttttttttttttt

SEQ ID NO: 2457 - DNA, 84 bp, Artificial
  Barcode component
  misc_feature (33)..(34): n is a, c, g, or t
  misc_feature (43)..(44): n is a, c, g, or t
  misc_feature (53)..(54): n is a, c, g, or t
tttttttaagcagtggtatcaacgcagagtacnnaaggcctanntacggcatnntttttttttttttttttttttttttttttt

SEQ ID NO: 2458 - DNA, 84 bp, Artificial
  Barcode component
  misc_feature (33)..(34): n is a, c, g, or t
  misc_feature (43)..(44): n is a, c, g, or t
  misc_feature (53)..(54): n is a, c, g, or t
tttttttaagcagtggtatcaacgcagagtacnnaaggcctannttggatcgnntttttttttttttttttttttttttttttt

SEQ ID NO: 2459 - DNA, 84 bp, Artificial
  Barcode component
  misc_feature (33)..(34): n is a, c, g, or t
  misc_feature (43)..(44): n is a, c, g, or t
  misc_feature (53)..(54): n is a, c, g, or t
tttttttaagcagtggtatcaacgcagagtacnnaaggcctanntggaacganntttttttttttttttttttttttttttttt

SEQ ID NO: 2460 - DNA, 84 bp, Artificial
  Barcode component
  misc_feature (33)..(34): n is a, c, g, or t
  misc_feature (43)..(44): n is a, c, g, or t
  misc_feature (53)..(54): n is a, c, g, or t
tttttttaagcagtggtatcaacgcagagtacnnaaggcctannggcaatcanntttttttttttttttttttttttttttttt

SEQ ID NO: 2461 - DNA, 84 bp, Artificial
  Barcode component
  misc_feature (33)..(34): n is a, c, g, or t
  misc_feature (43)..(44): n is a, c, g, or t
  misc_feature (53)..(54): n is a, c, g, or t
tttttttaagcagtggtatcaacgcagagtacnnaaggcctanngaatccganntttttttttttttttttttttttttttttt

SEQ ID NO: 2462 - DNA, 84 bp, Artificial
  Barcode component
  misc_feature (33)..(34): n is a, c, g, or t
  misc_feature (43)..(44): n is a, c, g, or t
  misc_feature (53)..(54): n is a, c, g, or t
tttttttaagcagtggtatcaacgcagagtacnnaaggcctannttacggtgnntttttttttttttttttttttttttttttt

SEQ ID NO: 2463 - DNA, 84 bp, Artificial
  Barcode component
  misc_feature (33)..(34): n is a, c, g, or t
  misc_feature (43)..(44): n is a, c, g, or t
  misc_feature (53)..(54): n is a, c, g, or t
tttttttaagcagtggtatcaacgcagagtacnnaaggcctanncatatcggnntttttttttttttttttttttttttttttt

SEQ ID NO: 2464 - DNA, 84 bp, Artificial
  Barcode component
  misc_feature (33)..(34): n is a, c, g, or t
  misc_feature (43)..(44): n is a, c, g, or t
  misc_feature (53)..(54): n is a, c, g, or t
tttttttaagcagtggtatcaacgcagagtacnnaaggcctanncttcggtanntttttttttttttttttttttttttttttt

SEQ ID NO: 2465 - DNA, 84 bp, Artificial
  Barcode component
  misc_feature (33)..(34): n is a, c, g, or t
  misc_feature (43)..(44): n is a, c, g, or t
  misc_feature (53)..(54): n is a, c, g, or t
tttttttaagcagtggtatcaacgcagagtacnnaaggcctanntcctaacgnntttttttttttttttttttttttttttttt

SEQ ID NO: 2466 - DNA, 84 bp, Artificial
  Barcode component
  misc_feature (33)..(34): n is a, c, g, or t
  misc_feature (43)..(44): n is a, c, g, or t
  misc_feature (53)..(54): n is a, c, g, or t
tttttttaagcagtggtatcaacgcagagtacnnaaggcctanngtaagccanntttttttttttttttttttttttttttttt

SEQ ID NO: 2467 - DNA, 84 bp, Artificial
  Barcode component
  misc_feature (33)..(34): n is a, c, g, or t
  misc_feature (43)..(44): n is a, c, g, or t
  misc_feature (53)..(54): n is a, c, g, or t
tttttttaagcagtggtatcaacgcagagtacnnaaggcctanntaaggtggnntttttttttttttttttttttttttttttt

SEQ ID NO: 2468 - DNA, 84 bp, Artificial
  Barcode component
  misc_feature (33)..(34): n is a, c, g, or t
  misc_feature (43)..(44): n is a, c, g, or t
  misc_feature (53)..(54): n is a, c, g, or t
tttttttaagcagtggtatcaacgcagagtacnnaaggcctannggtaagctnntttttttttttttttttttttttttttttt

SEQ ID NO: 2469 - DNA, 84 bp, Artificial
  Barcode component
  misc_feature (33)..(34): n is a, c, g, or t
  misc_feature (43)..(44): n is a, c, g, or t
  misc_feature (53)..(54): n is a, c, g, or t
tttttttaagcagtggtatcaacgcagagtacnnaaggcctanntgtgtcganntttttttttttttttttttttttttttttt

SEQ ID NO: 2470 - DNA, 84 bp, Artificial
  Barcode component
  misc_feature (33)..(34): n is a, c, g, or t
  misc_feature (43)..(44): n is a, c, g, or t
  misc_feature (53)..(54): n is a, c, g, or t
tttttttaagcagtggtatcaacgcagagtacnnaaggcctanngagcatganntttttttttttttttttttttttttttttt

SEQ ID NO: 2471 - DNA, 84 bp, Artificial
  Barcode component
  misc_feature (33)..(34): n is a, c, g, or t
  misc_feature (43)..(44): n is a, c, g, or t
  misc_feature (53)..(54): n is a, c, g, or t
tttttttaagcagtggtatcaacgcagagtacnnaaggcctanntcgaagtcnntttttttttttttttttttttttttttttt

SEQ ID NO: 2472 - DNA, 84 bp, Artificial
  Barcode component
  misc_feature (33)..(34): n is a, c, g, or t
  misc_feature (43)..(44): n is a, c, g, or t
  misc_feature (53)..(54): n is a, c, g, or t
tttttttaagcagtggtatcaacgcagagtacnnaaggcctannggtgaacanntttttttttttttttttttttttttttttt

SEQ ID NO: 2473 - DNA, 84 bp, Artificial
  Barcode component
  misc_feature (33)..(34): n is a, c, g, or t
  misc_feature (43)..(44): n is a, c, g, or t
  misc_feature (53)..(54): n is a, c, g, or t
tttttttaagcagtggtatcaacgcagagtacnnaaggcctannacatgcacnntttttttttttttttttttttttttttttt

SEQ ID NO: 2474 - DNA, 84 bp, Artificial
  Barcode component
  misc_feature (33)..(34): n is a, c, g, or t
  misc_feature (43)..(44): n is a, c, g, or t
  misc_feature (53)..(54): n is a, c, g, or t
tttttttaagcagtggtatcaacgcagagtacnnaaggcctannccaacagtnntttttttttttttttttttttttttttttt

SEQ ID NO: 2475 - DNA, 84 bp, Artificial
  Barcode component
  misc_feature (33)..(34): n is a, c, g, or t
  misc_feature (43)..(44): n is a, c, g, or t
  misc_feature (53)..(54): n is a, c, g, or t
tttttttaagcagtggtatcaacgcagagtacnnaaggcctannagaacagcnntttttttttttttttttttttttttttttt

SEQ ID NO: 2476 - DNA, 84 bp, Artificial
  Barcode component
  misc_feature (33)..(34): n is a, c, g, or t
  misc_feature (43)..(44): n is a, c, g, or t
  misc_feature (53)..(54): n is a, c, g, or t
tttttttaagcagtggtatcaacgcagagtacnnaaggcctanngaacacgtnntttttttttttttttttttttttttttttt

SEQ ID NO: 2477 - DNA, 84 bp, Artificial
  Barcode component
  misc_feature (33)..(34): n is a, c, g, or t
  misc_feature (43)..(44): n is a, c, g, or t
  misc_feature (53)..(54): n is a, c, g, or t
tttttttaagcagtggtatcaacgcagagtacnnaaggcctannggtcttcanntttttttttttttttttttttttttttttt

SEQ ID NO: 2478 - DNA, 84 bp, Artificial
  Barcode component
  misc_feature (33)..(34): n is a, c, g, or t
  misc_feature (43)..(44): n is a, c, g, or t
  misc_feature (53)..(54): n is a, c, g, or t
tttttttaagcagtggtatcaacgcagagtacnnaaggcctannaggttcagnntttttttttttttttttttttttttttttt

SEQ ID NO: 2479 - DNA, 84 bp, Artificial
  Barcode component
  misc_feature (33)..(34): n is a, c, g, or t
  misc_feature (43)..(44): n is a, c, g, or t
  misc_feature (53)..(54): n is a, c, g, or t
tttttttaagcagtggtatcaacgcagagtacnnaaggcctannctagagcanntttttttttttttttttttttttttttttt

SEQ ID NO: 2480 - DNA, 84 bp, Artificial
  Barcode component
  misc_feature (33)..(34): n is a, c, g, or t
  misc_feature (43)..(44): n is a, c, g, or t
  misc_feature (53)..(54): n is a, c, g, or t
tttttttaagcagtggtatcaacgcagagtacnnaaggcctanncttctagcnntttttttttttttttttttttttttttttt

SEQ ID NO: 2481 - DNA, 84 bp, Artificial
  Barcode component
  misc_feature (33)..(34): n is a, c, g, or t
  misc_feature (43)..(44): n is a, c, g, or t
  misc_feature (53)..(54): n is a, c, g, or t
tttttttaagcagtggtatcaacgcagagtacnnaaggcctanngagtaacgnntttttttttttttttttttttttttttttt

SEQ ID NO: 2482 - DNA, 84 bp, Artificial
  Barcode component
  misc_feature (33)..(34): n is a, c, g, or t
  misc_feature (43)..(44): n is a, c, g, or t
  misc_feature (53)..(54): n is a, c, g, or t
tttttttaagcagtggtatcaacgcagagtacnnaaggcctannctaagaggnntttttttttttttttttttttttttttttt

SEQ ID NO: 2483 - DNA, 84 bp, Artificial
  Barcode component
  misc_feature (33)..(34): n is a, c, g, or t
  misc_feature (43)..(44): n is a, c, g, or t
  misc_feature (53)..(54): n is a, c, g, or t
tttttttaagcagtggtatcaacgcagagtacnnaaggcctannacgtgtagnntttttttttttttttttttttttttttttt

SEQ ID NO: 2484 - DNA, 84 bp, Artificial
  Barcode component
  misc_feature (33)..(34): n is a, c, g, or t
  misc_feature (43)..(44): n is a, c, g, or t
  misc_feature (53)..(54): n is a, c, g, or t
tttttttaagcagtggtatcaacgcagagtacnnaaggcctannactacaggnntttttttttttttttttttttttttttttt

SEQ ID NO: 2485 - DNA, 84 bp, Artificial
  Barcode component
  misc_feature (33)..(34): n is a, c, g, or t
  misc_feature (43)..(44): n is a, c, g, or t
  misc_feature (53)..(54): n is a, c, g, or t
tttttttaagcagtggtatcaacgcagagtacnnaaggcctanntacaggtcnntttttttttttttttttttttttttttttt

SEQ ID NO: 2486 - DNA, 84 bp, Artificial
  Barcode component
  misc_feature (33)..(34): n is a, c, g, or t
  misc_feature (43)..(44): n is a, c, g, or t
  misc_feature (53)..(54): n is a, c, g, or t
tttttttaagcagtggtatcaacgcagagtacnnaaggcctannctcacatgnntttttttttttttttttttttttttttttt

SEQ ID NO: 2487 - DNA, 84 bp, Artificial
  Barcode component
  misc_feature (33)..(34): n is a, c, g, or t
  misc_feature (43)..(44): n is a, c, g, or t
  misc_feature (53)..(54): n is a, c, g, or t
tttttttaagcagtggtatcaacgcagagtacnnaaggcctannactaggagnntttttttttttttttttttttttttttttt

SEQ ID NO: 2488 - DNA, 84 bp, Artificial
  Barcode component
  misc_feature (33)..(34): n is a, c, g, or t
  misc_feature (43)..(44): n is a, c, g, or t
  misc_feature (53)..(54): n is a, c, g, or t
tttttttaagcagtggtatcaacgcagagtacnnaaggcctannccatagganntttttttttttttttttttttttttttttt

SEQ ID NO: 2489 - DNA, 84 bp, Artificial
  Barcode component
  misc_feature (33)..(34): n is a, c, g, or t
  misc_feature (43)..(44): n is a, c, g, or t
  misc_feature (53)..(54): n is a, c, g, or t
tttttttaagcagtggtatcaacgcagagtacnnaaggcctannggagaatcnntttttttttttttttttttttttttttttt

SEQ ID NO: 2490 - DNA, 84 bp, Artificial
  Barcode component
  misc_feature (33)..(34): n is a, c, g, or t
  misc_feature (43)..(44): n is a, c, g, or t
  misc_feature (53)..(54): n is a, c, g, or t
tttttttaagcagtggtatcaacgcagagtacnnaaggcctanngccaagaanntttttttttttttttttttttttttttttt

SEQ ID NO: 2491 - DNA, 84 bp, Artificial
  Barcode component
  misc_feature (33)..(34): n is a, c, g, or t
  misc_feature (43)..(44): n is a, c, g, or t
  misc_feature (53)..(54): n is a, c, g, or t
tttttttaagcagtggtatcaacgcagagtacnnaaggcctannaaggcaagnntttttttttttttttttttttttttttttt

SEQ ID NO: 2492 - DNA, 84 bp, Artificial
  Barcode component
  misc_feature (33)..(34): n is a, c, g, or t
  misc_feature (43)..(44): n is a, c, g, or t
  misc_feature (53)..(54): n is a, c, g, or t
tttttttaagcagtggtatcaacgcagagtacnnaaggcctannaatgtcgcnntttttttttttttttttttttttttttttt

SEQ ID NO: 2493 - DNA, 84 bp, Artificial
  Barcode component
  misc_feature (33)..(34): n is a, c, g, or t
  misc_feature (43)..(44): n is a, c, g, or t
  misc_feature (53)..(54): n is a, c, g, or t
tttttttaagcagtggtatcaacgcagagtacnnaaggcctannatggaaccnntttttttttttttttttttttttttttttt

SEQ ID NO: 2494 - DNA, 84 bp, Artificial
  Barcode component
  misc_feature (33)..(34): n is a, c, g, or t
  misc_feature (43)..(44): n is a, c, g, or t
  misc_feature (53)..(54): n is a, c, g, or t
tttttttaagcagtggtatcaacgcagagtacnnaaggcctannagaggcatnntttttttttttttttttttttttttttttt

SEQ ID NO: 2495 - DNA, 84 bp, Artificial
  Barcode component
  misc_feature (33)..(34): n is a, c, g, or t
  misc_feature (43)..(44): n is a, c, g, or t
  misc_feature (53)..(54): n is a, c, g, or t
tttttttaagcagtggtatcaacgcagagtacnnaaggcctanntgcatagcnntttttttttttttttttttttttttttttt

SEQ ID NO: 2496 - DNA, 84 bp, Artificial
  Barcode component
  misc_feature (33)..(34): n is a, c, g, or t
  misc_feature (43)..(44): n is a, c, g, or t
  misc_feature (53)..(54): n is a, c, g, or t
tttttttaagcagtggtatcaacgcagagtacnnaaggcctannctaacgganntttttttttttttttttttttttttttttt

SEQ ID NO: 2497 - DNA, 84 bp, Artificial
  Barcode component
  misc_feature (33)..(34): n is a, c, g, or t
  misc_feature (43)..(44): n is a, c, g, or t
  misc_feature (53)..(54): n is a, c, g, or t
tttttttaagcagtggtatcaacgcagagtacnnaaggcctanntatcgaggnntttttttttttttttttttttttttttttt

SEQ ID NO: 2498 - DNA, 84 bp, Artificial
  Barcode component
  misc_feature (33)..(34): n is a, c, g, or t
  misc_feature (43)..(44): n is a, c, g, or t
  misc_feature (53)..(54): n is a, c, g, or t
tttttttaagcagtggtatcaacgcagagtacnnaaggcctanncatagcctnntttttttttttttttttttttttttttttt

SEQ ID NO: 2499 - DNA, 84 bp, Artificial
  Barcode component
  misc_feature (33)..(34): n is a, c, g, or t
  misc_feature (43)..(44): n is a, c, g, or t
  misc_feature (53)..(54): n is a, c, g, or t
tttttttaagcagtggtatcaacgcagagtacnnaaggcctannatcgagacnntttttttttttttttttttttttttttttt

SEQ ID NO: 2500 - DNA, 84 bp, Artificial
  Barcode component
  misc_feature (33)..(34): n is a, c, g, or t
  misc_feature (43)..(44): n is a, c, g, or t
  misc_feature (53)..(54): n is a, c, g, or t
tttttttaagcagtggtatcaacgcagagtacnnaaggcctannggaagagtnntttttttttttttttttttttttttttttt

SEQ ID NO: 2501 - DNA, 84 bp, Artificial
  Barcode component
  misc_feature (33)..(34): n is a, c, g, or t
  misc_feature (43)..(44): n is a, c, g, or t
  misc_feature (53)..(54): n is a, c, g, or t
tttttttaagcagtggtatcaacgcagagtacnnaaggcctannccaagtagnntttttttttttttttttttttttttttttt

SEQ ID NO: 2502 - DNA, 84 bp, Artificial
  Barcode component
  misc_feature (33)..(34): n is a, c, g, or t
  misc_feature (43)..(44): n is a, c, g, or t
  misc_feature (53)..(54): n is a, c, g, or t
tttttttaagcagtggtatcaacgcagagtacnnaaggcctannctgaacagnntttttttttttttttttttttttttttttt

SEQ ID NO: 2503 - DNA, 84 bp, Artificial
  Barcode component
  misc_feature (33)..(34): n is a, c, g, or t
  misc_feature (43)..(44): n is a, c, g, or t
  misc_feature (53)..(54): n is a, c, g, or t
tttttttaagcagtggtatcaacgcagagtacnnaaggcctanngtaggttcnntttttttttttttttttttttttttttttt

SEQ ID NO: 2504 - DNA, 84 bp, Artificial
  Barcode component
  misc_feature (33)..(34): n is a, c, g, or t
  misc_feature (43)..(44): n is a, c, g, or t
  misc_feature (53)..(54): n is a, c, g, or t
tttttttaagcagtggtatcaacgcagagtacnnaaggcctanngtatggacnntttttttttttttttttttttttttttttt

SEQ ID NO: 2505 - DNA, 84 bp, Artificial
  Barcode component
  misc_feature (33)..(34): n is a, c, g, or t
  misc_feature (43)..(44): n is a, c, g, or t
  misc_feature (53)..(54): n is a, c, g, or t
tttttttaagcagtggtatcaacgcagagtacnnaaggcctanntcgcaacanntttttttttttttttttttttttttttttt

SEQ ID NO: 2506 - DNA, 84 bp, Artificial
  Barcode component
  misc_feature (33)..(34): n is a, c, g, or t
  misc_feature (43)..(44): n is a, c, g, or t
  misc_feature (53)..(54): n is a, c, g, or t
tttttttaagcagtggtatcaacgcagagtacnnaaggcctannccgctaatnntttttttttttttttttttttttttttttt

SEQ ID NO: 2507 - DNA, 84 bp, Artificial
  Barcode component
  misc_feature (33)..(34): n is a, c, g, or t
  misc_feature (43)..(44): n is a, c, g, or t
  misc_feature (53)..(54): n is a, c, g, or t
tttttttaagcagtggtatcaacgcagagtacnnaaggcctanngattcgcanntttttttttttttttttttttttttttttt

SEQ ID NO: 2508 - DNA, 84 bp, Artificial
  Barcode component
  misc_feature (33)..(34): n is a, c, g, or t
  misc_feature (43)..(44): n is a, c, g, or t
  misc_feature (53)..(54): n is a, c, g, or t
tttttttaagcagtggtatcaacgcagagtacnnaaggcctanncgatggaanntttttttttttttttttttttttttttttt

SEQ ID NO: 2509 - DNA, 84 bp, Artificial
  Barcode component
  misc_feature (33)..(34): n is a, c, g, or t
  misc_feature (43)..(44): n is a, c, g, or t
  misc_feature (53)..(54): n is a, c, g, or t
tttttttaagcagtggtatcaacgcagagtacnnaaggcctannagcaagganntttttttttttttttttttttttttttttt

SEQ ID NO: 2510 - DNA, 84 bp, Artificial
  Barcode component
  misc_feature (33)..(34): n is a, c, g, or t
  misc_feature (43)..(44): n is a, c, g, or t
  misc_feature (53)..(54): n is a, c, g, or t
tttttttaagcagtggtatcaacgcagagtacnnaaggcctanncgtagcaanntttttttttttttttttttttttttttttt

SEQ ID NO: 2511 - DNA, 84 bp, Artificial
  Barcode component
  misc_feature (33)..(34): n is a, c, g, or t
  misc_feature (43)..(44): n is a, c, g, or t
  misc_feature (53)..(54): n is a, c, g, or t
tttttttaagcagtggtatcaacgcagagtacnnaaggcctanntggcagtanntttttttttttttttttttttttttttttt

SEQ ID NO: 2512 - DNA, 84 bp, Artificial
  Barcode component
  misc_feature (33)..(34): n is a, c, g, or t
  misc_feature (43)..(44): n is a, c, g, or t
  misc_feature (53)..(54): n is a, c, g, or t
tttttttaagcagtggtatcaacgcagagtacnnaaggcctanncggtagttnntttttttttttttttttttttttttttttt

SEQ ID NO: 2513 - DNA, 84 bp, Artificial
  Barcode component
  misc_feature (33)..(34): n is a, c, g, or t
  misc_feature (43)..(44): n is a, c, g, or t
  misc_feature (53)..(54): n is a, c, g, or t
tttttttaagcagtggtatcaacgcagagtacnnaaggcctanntgacttcgnntttttttttttttttttttttttttttttt

SEQ ID NO: 2514 - DNA, 84 bp, Artificial
  Barcode component
  misc_feature (33)..(34): n is a, c, g, or t
  misc_feature (43)..(44): n is a, c, g, or t
  misc_feature (53)..(54): n is a, c, g, or t
tttttttaagcagtggtatcaacgcagagtacnnaaggcctanngagtgcaanntttttttttttttttttttttttttttttt

SEQ ID NO: 2515 - DNA, 84 bp, Artificial
  Barcode component
  misc_feature (33)..(34): n is a, c, g, or t
  misc_feature (43)..(44): n is a, c, g, or t
  misc_feature (53)..(54): n is a, c, g, or t
tttttttaagcagtggtatcaacgcagagtacnnaaggcctannacggtaacnntttttttttttttttttttttttttttttt

SEQ ID NO: 2516 - DNA, 84 bp, Artificial
  Barcode component
  misc_feature (33)..(34): n is a, c, g, or t
  misc_feature (43)..(44): n is a, c, g, or t
  misc_feature (53)..(54): n is a, c, g, or t
tttttttaagcagtggtatcaacgcagagtacnnaaggcctannaagtggtgnntttttttttttttttttttttttttttttt

SEQ ID NO: 2517 - DNA, 84 bp, Artificial
  Barcode component
  misc_feature (33)..(34): n is a, c, g, or t
  misc_feature (43)..(44): n is a, c, g, or t
  misc_feature (53)..(54): n is a, c, g, or t
tttttttaagcagtggtatcaacgcagagtacnnaaggcctannggagacaanntttttttttttttttttttttttttttttt

SEQ ID NO: 2518 - DNA, 84 bp, Artificial
  Barcode component
  misc_feature (33)..(34): n is a, c, g, or t
  misc_feature (43)..(44): n is a, c, g, or t
  misc_feature (53)..(54): n is a, c, g, or t
tttttttaagcagtggtatcaacgcagagtacnnaaggcctanntcaaggacnntttttttttttttttttttttttttttttt

SEQ ID NO: 2519 - DNA, 84 bp, Artificial
  Barcode component
  misc_feature (33)..(34): n is a, c, g, or t
  misc_feature (43)..(44): n is a, c, g, or t
  misc_feature (53)..(54): n is a, c, g, or t
tttttttaagcagtggtatcaacgcagagtacnnaaggcctannaagagagcnntttttttttttttttttttttttttttttt

SEQ ID NO: 2520 - DNA, 84 bp, Artificial
  Barcode component
  misc_feature (33)..(34): n is a, c, g, or t
  misc_feature (43)..(44): n is a, c, g, or t
  misc_feature (53)..(54): n is a, c, g, or t
tttttttaagcagtggtatcaacgcagagtacnnaaggcctanncgagagatnntttttttttttttttttttttttttttttt

SEQ ID NO: 2521 - DNA, 84 bp, Artificial
  Barcode component
  misc_feature (33)..(34): n is a, c, g, or t
  misc_feature (43)..(44): n is a, c, g, or t
  misc_feature (53)..(54): n is a, c, g, or t
tttttttaagcagtggtatcaacgcagagtacnnaaggcctannacagatggnntttttttttttttttttttttttttttttt

SEQ ID NO: 2522 - DNA, 84 bp, Artificial
  Barcode component
  misc_feature (33)..(34): n is a, c, g, or t
  misc_feature (43)..(44): n is a, c, g, or t
  misc_feature (53)..(54): n is a, c, g, or t
tttttttaagcagtggtatcaacgcagagtacnnaaggcctannaggagtcanntttttttttttttttttttttttttttttt

SEQ ID NO: 2523 - DNA, 84 bp, Artificial
  Barcode component
  misc_feature (33)..(34): n is a, c, g, or t
  misc_feature (43)..(44): n is a, c, g, or t
  misc_feature (53)..(54): n is a, c, g, or t
tttttttaagcagtggtatcaacgcagagtacnnaaggcctanncgtgttacnntttttttttttttttttttttttttttttt

SEQ ID NO: 2524 - DNA, 84 bp, Artificial
  Barcode component
  misc_feature (33)..(34): n is a, c, g, or t
  misc_feature (43)..(44): n is a, c, g, or t
  misc_feature (53)..(54): n is a, c, g, or t
tttttttaagcagtggtatcaacgcagagtacnnaaggcctanntagtgtgcnntttttttttttttttttttttttttttttt

SEQ ID NO: 2525 - DNA, 84 bp, Artificial
  Barcode component
  misc_feature (33)..(34): n is a, c, g, or t
  misc_feature (43)..(44): n is a, c, g, or t
  misc_feature (53)..(54): n is a, c, g, or t
tttttttaagcagtggtatcaacgcagagtacnnaaggcctannctcatgacnntttttttttttttttttttttttttttttt

SEQ ID NO: 2526 - DNA, 84 bp, Artificial
  Barcode component
  misc_feature (33)..(34): n is a, c, g, or t
  misc_feature (43)..(44): n is a, c, g, or t
  misc_feature (53)..(54): n is a, c, g, or t
tttttttaagcagtggtatcaacgcagagtacnnaaggcctanngtatccagnntttttttttttttttttttttttttttttt

SEQ ID NO: 2527 - DNA, 84 bp, Artificial
  Barcode component
  misc_feature (33)..(34): n is a, c, g, or t
  misc_feature (43)..(44): n is a, c, g, or t
  misc_feature (53)..(54): n is a, c, g, or t
tttttttaagcagtggtatcaacgcagagtacnnaaggcctannacgcctatnntttttttttttttttttttttttttttttt

SEQ ID NO: 2528 - DNA, 84 bp, Artificial
  Barcode component
  misc_feature (33)..(34): n is a, c, g, or t
  misc_feature (43)..(44): n is a, c, g, or t
  misc_feature (53)..(54): n is a, c, g, or t
tttttttaagcagtggtatcaacgcagagtacnnaaggcctannaacgacctnntttttttttttttttttttttttttttttt

SEQ ID NO: 2529 - DNA, 84 bp, Artificial
  Barcode component
  misc_feature (33)..(34): n is a, c, g, or t
  misc_feature (43)..(44): n is a, c, g, or t
  misc_feature (53)..(54): n is a, c, g, or t
tttttttaagcagtggtatcaacgcagagtacnnaaggcctannatcaggctnntttttttttttttttttttttttttttttt

SEQ ID NO: 2530 - DNA, 84 bp, Artificial
  Barcode component
  misc_feature (33)..(34): n is a, c, g, or t
  misc_feature (43)..(44): n is a, c, g, or t
  misc_feature (53)..(54): n is a, c, g, or t
tttttttaagcagtggtatcaacgcagagtacnnaaggcctanncaagttcgnntttttttttttttttttttttttttttttt

SEQ ID NO: 2531 - DNA, 84 bp, Artificial
  Barcode component
  misc_feature (33)..(34): n is a, c, g, or t
  misc_feature (43)..(44): n is a, c, g, or t
  misc_feature (53)..(54): n is a, c, g, or t
tttttttaagcagtggtatcaacgcagagtacnnaaggcctanntagccaganntttttttttttttttttttttttttttttt

SEQ ID NO: 2532 - DNA, 84 bp, Artificial
  Barcode component
  misc_feature (33)..(34): n is a, c, g, or t
  misc_feature (43)..(44): n is a, c, g, or t
  misc_feature (53)..(54): n is a, c, g, or t
tttttttaagcagtggtatcaacgcagagtacnnaaggcctanncaatcacgnntttttttttttttttttttttttttttttt

SEQ ID NO: 2533 - DNA, 84 bp, Artificial
  Barcode component
  misc_feature (33)..(34): n is a, c, g, or t
  misc_feature (43)..(44): n is a, c, g, or t
  misc_feature (53)..(54): n is a, c, g, or t
tttttttaagcagtggtatcaacgcagagtacnnaaggcctanngcaacaagnntttttttttttttttttttttttttttttt

SEQ ID NO: 2534 - DNA, 84 bp, Artificial
  Barcode component
  misc_feature (33)..(34): n is a, c, g, or t
  misc_feature (43)..(44): n is a, c, g, or t
  misc_feature (53)..(54): n is a, c, g, or t
tttttttaagcagtggtatcaacgcagagtacnnaaggcctanncacgacaanntttttttttttttttttttttttttttttt

SEQ ID NO: 2535 - DNA, 84 bp, Artificial
  Barcode component
  misc_feature (33)..(34): n is a, c, g, or t
  misc_feature (43)..(44): n is a, c, g, or t
  misc_feature (53)..(54): n is a, c, g, or t
tttttttaagcagtggtatcaacgcagagtacnnaaggcctanntacggaganntttttttttttttttttttttttttttttt

SEQ ID NO: 2536 - DNA, 84 bp, Artificial
  Barcode component
  misc_feature (33)..(34): n is a, c, g, or t
  misc_feature (43)..(44): n is a, c, g, or t
  misc_feature (53)..(54): n is a, c, g, or t
tttttttaagcagtggtatcaacgcagagtacnnaaggcctanncgacaaganntttttttttttttttttttttttttttttt

SEQ ID NO: 2537 - DNA, 84 bp, Artificial
  Barcode component
  misc_feature (33)..(34): n is a, c, g, or t
  misc_feature (43)..(44): n is a, c, g, or t
  misc_feature (53)..(54): n is a, c, g, or t
tttttttaagcagtggtatcaacgcagagtacnnaaggcctanncgaagtganntttttttttttttttttttttttttttttt

SEQ ID NO: 2538 - DNA, 84 bp, Artificial
  Barcode component
  misc_feature (33)..(34): n is a, c, g, or t
  misc_feature (43)..(44): n is a, c, g, or t
  misc_feature (53)..(54): n is a, c, g, or t
tttttttaagcagtggtatcaacgcagagtacnnaaggcctannagctggtanntttttttttttttttttttttttttttttt

SEQ ID NO: 2539 - DNA, 84 bp, Artificial
  Barcode component
  misc_feature (33)..(34): n is a, c, g, or t
  misc_feature (43)..(44): n is a, c, g, or t
  misc_feature (53)..(54): n is a, c, g, or t
tttttttaagcagtggtatcaacgcagagtacnnaaggcctannaactaggcnntttttttttttttttttttttttttttttt

SEQ ID NO: 2540 - DNA, 84 bp, Artificial
  Barcode component
  misc_feature (33)..(34): n is a, c, g, or t
  misc_feature (43)..(44): n is a, c, g, or t
  misc_feature (53)..(54): n is a, c, g, or t
tttttttaagcagtggtatcaacgcagagtacnnaaggcctanncagcaagtnntttttttttttttttttttttttttttttt

SEQ ID NO: 2541 - DNA, 84 bp, Artificial
  Barcode component
  misc_feature (33)..(34): n is a, c, g, or t
  misc_feature (43)..(44): n is a, c, g, or t
  misc_feature (53)..(54): n is a, c, g, or t
tttttttaagcagtggtatcaacgcagagtacnnaaggcctannacgaggtanntttttttttttttttttttttttttttttt

SEQ ID NO: 2542 - DNA, 84 bp, Artificial
  Barcode component
  misc_feature (33)..(34): n is a, c, g, or t
  misc_feature (43)..(44): n is a, c, g, or t
  misc_feature (53)..(54): n is a, c, g, or t
tttttttaagcagtggtatcaacgcagagtacnnaaggcctanncatcttccnntttttttttttttttttttttttttttttt

SEQ ID NO: 2543 - DNA, 84 bp, Artificial
  Barcode component
  misc_feature (33)..(34): n is a, c, g, or t
  misc_feature (43)..(44): n is a, c, g, or t
  misc_feature (53)..(54): n is a, c, g, or t
tttttttaagcagtggtatcaacgcagagtacnnaaggcctanncctgaatcnntttttttttttttttttttttttttttttt

SEQ ID NO: 2544 - DNA, 84 bp, Artificial
  Barcode component
  misc_feature (33)..(34): n is a, c, g, or t
  misc_feature (43)..(44): n is a, c, g, or t
  misc_feature (53)..(54): n is a, c, g, or t
tttttttaagcagtggtatcaacgcagagtacnnaaggcctanntgcagactnntttttttttttttttttttttttttttttt

SEQ ID NO: 2545 - DNA, 84 bp, Artificial
  Barcode component
  misc_feature (33)..(34): n is a, c, g, or t
  misc_feature (43)..(44): n is a, c, g, or t
  misc_feature (53)..(54): n is a, c, g, or t
tttttttaagcagtggtatcaacgcagagtacnnaaggcctannagatgtggnntttttttttttttttttttttttttttttt

SEQ ID NO: 2546 - DNA, 84 bp, Artificial
  Barcode component
  misc_feature (33)..(34): n is a, c, g, or t
  misc_feature (43)..(44): n is a, c, g, or t
  misc_feature (53)..(54): n is a, c, g, or t
tttttttaagcagtggtatcaacgcagagtacnnaaggcctannagttcgacnntttttttttttttttttttttttttttttt

SEQ ID NO: 2547 - DNA, 84 bp, Artificial
  Barcode component
  misc_feature (33)..(34): n is a, c, g, or t
  misc_feature (43)..(44): n is a, c, g, or t
  misc_feature (53)..(54): n is a, c, g, or t
tttttttaagcagtggtatcaacgcagagtacnnaaggcctannacaacctcnntttttttttttttttttttttttttttttt

SEQ ID NO: 2548 - DNA, 84 bp, Artificial
  Barcode component
  misc_feature (33)..(34): n is a, c, g, or t
  misc_feature (43)..(44): n is a, c, g, or t
  misc_feature (53)..(54): n is a, c, g, or t
tttttttaagcagtggtatcaacgcagagtacnnaaggcctanncatggtagnntttttttttttttttttttttttttttttt

SEQ ID NO: 2549 - DNA, 84 bp, Artificial
  Barcode component
  misc_feature (33)..(34): n is a, c, g, or t
  misc_feature (43)..(44): n is a, c, g, or t
  misc_feature (53)..(54): n is a, c, g, or t
tttttttaagcagtggtatcaacgcagagtacnnaaggcctanncgtatctcnntttttttttttttttttttttttttttttt

SEQ ID NO: 2550 - DNA, 84 bp, Artificial
  Barcode component
  misc_feature (33)..(34): n is a, c, g, or t
  misc_feature (43)..(44): n is a, c, g, or t
  misc_feature (53)..(54): n is a, c, g, or t
tttttttaagcagtggtatcaacgcagagtacnnaaggcctanncctagttcnntttttttttttttttttttttttttttttt

SEQ ID NO: 2551 - DNA, 84 bp, Artificial
  Barcode component
  misc_feature (33)..(34): n is a, c, g, or t
  misc_feature (43)..(44): n is a, c, g, or t
  misc_feature (53)..(54): n is a, c, g, or t
tttttttaagcagtggtatcaacgcagagtacnnaaggcctanncaagagtcnntttttttttttttttttttttttttttttt

SEQ ID NO: 2552 - DNA, 84 bp, Artificial
  Barcode component
  misc_feature (33)..(34): n is a, c, g, or t
  misc_feature (43)..(44): n is a, c, g, or t
  misc_feature (53)..(54): n is a, c, g, or t
tttttttaagcagtggtatcaacgcagagtacnncgtaatcgnnaatcggcanntttttttttttttttttttttttttttttt

SEQ ID NO: 2553 - DNA, 84 bp, Artificial
  Barcode component
  misc_feature (33)..(34): n is a, c, g, or t
  misc_feature (43)..(44): n is a, c, g, or t
  misc_feature (53)..(54): n is a, c, g, or t
tttttttaagcagtggtatcaacgcagagtacnncgtaatcgnntacggcatnntttttttttttttttttttttttttttttt

SEQ ID NO: 2554 - DNA, 84 bp, Artificial
  Barcode component
  misc_feature (33)..(34): n is a, c, g, or t
  misc_feature (43)..(44): n is a, c, g, or t
  misc_feature (53)..(54): n is a, c, g, or t
tttttttaagcagtggtatcaacgcagagtacnncgtaatcgnnttggatcgnntttttttttttttttttttttttttttttt

SEQ ID NO: 2555 - DNA, 84 bp, Artificial
  Barcode component
  misc_feature (33)..(34): n is a, c, g, or t
  misc_feature (43)..(44): n is a, c, g, or t
  misc_feature (53)..(54): n is a, c, g, or t
tttttttaagcagtggtatcaacgcagagtacnncgtaatcgnntggaacganntttttttttttttttttttttttttttttt

SEQ ID NO: 2556 - DNA, 84 bp, Artificial
  Barcode component
  misc_feature (33)..(34): n is a, c, g, or t
  misc_feature (43)..(44): n is a, c, g, or t
  misc_feature (53)..(54): n is a, c, g, or t
tttttttaagcagtggtatcaacgcagagtacnncgtaatcgnnggcaatcanntttttttttttttttttttttttttttttt

SEQ ID NO: 2557 - DNA, 84 bp, Artificial
  Barcode component
  misc_feature (33)..(34): n is a, c, g, or t
  misc_feature (43)..(44): n is a, c, g, or t
  misc_feature (53)..(54): n is a, c, g, or t
tttttttaagcagtggtatcaacgcagagtacnncgtaatcgnngaatccganntttttttttttttttttttttttttttttt

SEQ ID NO: 2558 - DNA, 84 bp, Artificial
  Barcode component
  misc_feature (33)..(34): n is a, c, g, or t
  misc_feature (43)..(44): n is a, c, g, or t
  misc_feature (53)..(54): n is a, c, g, or t
tttttttaagcagtggtatcaacgcagagtacnncgtaatcgnnttacggtgnntttttttttttttttttttttttttttttt

SEQ ID NO: 2559 - DNA, 84 bp, Artificial
  Barcode component
  misc_feature (33)..(34): n is a, c, g, or t
  misc_feature (43)..(44): n is a, c, g, or t
  misc_feature (53)..(54): n is a, c, g, or t
tttttttaagcagtggtatcaacgcagagtacnncgtaatcgnncatatcggnntttttttttttttttttttttttttttttt

SEQ ID NO: 2560 - DNA, 84 bp, Artificial
  Barcode component
  misc_feature (33)..(34): n is a, c, g, or t
  misc_feature (43)..(44): n is a, c, g, or t
  misc_feature (53)..(54): n is a, c, g, or t
tttttttaagcagtggtatcaacgcagagtacnncgtaatcgnncttcggtanntttttttttttttttttttttttttttttt

SEQ ID NO: 2561 - DNA, 84 bp, Artificial
  Barcode component
  misc_feature (33)..(34): n is a, c, g, or t
  misc_feature (43)..(44): n is a, c, g, or t
  misc_feature (53)..(54): n is a, c, g, or t
tttttttaagcagtggtatcaacgcagagtacnncgtaatcgnntcctaacgnntttttttttttttttttttttttttttttt

SEQ ID NO: 2562 - DNA, 84 bp, Artificial
  Barcode component
  misc_feature (33)..(34): n is a, c, g, or t
  misc_feature (43)..(44): n is a, c, g, or t
  misc_feature (53)..(54): n is a, c, g, or t
tttttttaagcagtggtatcaacgcagagtacnncgtaatcgnngtaagccanntttttttttttttttttttttttttttttt

SEQ ID NO: 2563 - DNA, 84 bp, Artificial
  Barcode component
  misc_feature (33)..(34): n is a, c, g, or t
  misc_feature (43)..(44): n is a, c, g, or t
  misc_feature (53)..(54): n is a, c, g, or t
tttttttaagcagtggtatcaacgcagagtacnncgtaatcgnntaaggtggnntttttttttttttttttttttttttttttt

SEQ ID NO: 2564 - DNA, 84 bp, Artificial
  Barcode component
  misc_feature (33)..(34): n is a, c, g, or t
  misc_feature (43)..(44): n is a, c, g, or t
  misc_feature (53)..(54): n is a, c, g, or t
tttttttaagcagtggtatcaacgcagagtacnncgtaatcgnnggtaagctnntttttttttttttttttttttttttttttt

SEQ ID NO: 2565 - DNA, 84 bp, Artificial
  Barcode component
  misc_feature (33)..(34): n is a, c, g, or t
  misc_feature (43)..(44): n is a, c, g, or t
  misc_feature (53)..(54): n is a, c, g, or t
tttttttaagcagtggtatcaacgcagagtacnncgtaatcgnntgtgtcganntttttttttttttttttttttttttttttt

SEQ ID NO: 2566 - DNA, 84 bp, Artificial
  Barcode component
  misc_feature (33)..(34): n is a, c, g, or t
  misc_feature (43)..(44): n is a, c, g, or t
  misc_feature (53)..(54): n is a, c, g, or t
tttttttaagcagtggtatcaacgcagagtacnncgtaatcgnngagcatganntttttttttttttttttttttttttttttt

SEQ ID NO: 2567 - DNA, 84 bp, Artificial
  Barcode component
  misc_feature (33)..(34): n is a, c, g, or t
  misc_feature (43)..(44): n is a, c, g, or t
  misc_feature (53)..(54): n is a, c, g, or t
tttttttaagcagtggtatcaacgcagagtacnncgtaatcgnntcgaagtcnntttttttttttttttttttttttttttttt

SEQ ID NO: 2568 - DNA, 84 bp, Artificial
  Barcode component
  misc_feature (33)..(34): n is a, c, g, or t
  misc_feature (43)..(44): n is a, c, g, or t
  misc_feature (53)..(54): n is a, c, g, or t
tttttttaagcagtggtatcaacgcagagtacnncgtaatcgnnggtgaacanntttttttttttttttttttttttttttttt

SEQ ID NO: 2569 - DNA, 84 bp, Artificial
  Barcode component
  misc_feature (33)..(34): n is a, c, g, or t
  misc_feature (43)..(44): n is a, c, g, or t
  misc_feature (53)..(54): n is a, c, g, or t
tttttttaagcagtggtatcaacgcagagtacnncgtaatcgnnacatgcacnntttttttttttttttttttttttttttttt

SEQ ID NO: 2570 - DNA, 84 bp, Artificial
  Barcode component
  misc_feature (33)..(34): n is a, c, g, or t
  misc_feature (43)..(44): n is a, c, g, or t
  misc_feature (53)..(54): n is a, c, g, or t
tttttttaagcagtggtatcaacgcagagtacnncgtaatcgnnccaacagtnntttttttttttttttttttttttttttttt

SEQ ID NO: 2571 - DNA, 84 bp, Artificial
  Barcode component
  misc_feature (33)..(34): n is a, c, g, or t
  misc_feature (43)..(44): n is a, c, g, or t
  misc_feature (53)..(54): n is a, c, g, or t
tttttttaagcagtggtatcaacgcagagtacnncgtaatcgnnagaacagcnntttttttttttttttttttttttttttttt

SEQ ID NO: 2572 - DNA, 84 bp, Artificial
  Barcode component
  misc_feature (33)..(34): n is a, c, g, or t
  misc_feature (43)..(44): n is a, c, g, or t
  misc_feature (53)..(54): n is a, c, g, or t
tttttttaagcagtggtatcaacgcagagtacnncgtaatcgnngaacacgtnntttttttttttttttttttttttttttttt

SEQ ID NO: 2573 - DNA, 84 bp, Artificial
  Barcode component
  misc_feature (33)..(34): n is a, c, g, or t
  misc_feature (43)..(44): n is a, c, g, or t
  misc_feature (53)..(54): n is a, c, g, or t
tttttttaagcagtggtatcaacgcagagtacnncgtaatcgnnggtcttcanntttttttttttttttttttttttttttttt

SEQ ID NO: 2574 - DNA, 84 bp, Artificial
  Barcode component
  misc_feature (33)..(34): n is a, c, g, or t
  misc_feature (43)..(44): n is a, c, g, or t
  misc_feature (53)..(54): n is a, c, g, or t
tttttttaagcagtggtatcaacgcagagtacnncgtaatcgnnaggttcagnntttttttttttttttttttttttttttttt

SEQ ID NO: 2575 - DNA, 84 bp, Artificial
  Barcode component
  misc_feature (33)..(34): n is a, c, g, or t
  misc_feature (43)..(44): n is a, c, g, or t
  misc_feature (53)..(54): n is a, c, g, or t
tttttttaagcagtggtatcaacgcagagtacnncgtaatcgnnctagagcanntttttttttttttttttttttttttttttt

SEQ ID NO: 2576 - DNA, 84 bp, Artificial
  Barcode component
  misc_feature (33)..(34): n is a, c, g, or t
  misc_feature (43)..(44): n is a, c, g, or t
  misc_feature (53)..(54): n is a, c, g, or t
tttttttaagcagtggtatcaacgcagagtacnncgtaatcgnncttctagcnntttttttttttttttttttttttttttttt

SEQ ID NO: 2577 - DNA, 84 bp, Artificial
  Barcode component
  misc_feature (33)..(34): n is a, c, g, or t
  misc_feature (43)..(44): n is a, c, g, or t
  misc_feature (53)..(54): n is a, c, g, or t
tttttttaagcagtggtatcaacgcagagtacnncgtaatcgnngagtaacgnntttttttttttttttttttttttttttttt

SEQ ID NO: 2578 - DNA, 84 bp, Artificial
  Barcode component
  misc_feature (33)..(34): n is a, c, g, or t
  misc_feature (43)..(44): n is a, c, g, or t
  misc_feature (53)..(54): n is a, c, g, or t
tttttttaagcagtggtatcaacgcagagtacnncgtaatcgnnctaagaggnntttttttttttttttttttttttttttttt

SEQ ID NO: 2579 - DNA, 84 bp, Artificial
  Barcode component
  misc_feature (33)..(34): n is a, c, g, or t
  misc_feature (43)..(44): n is a, c, g, or t
  misc_feature (53)..(54): n is a, c, g, or t
tttttttaagcagtggtatcaacgcagagtacnncgtaatcgnnacgtgtagnntttttttttttttttttttttttttttttt

SEQ ID NO: 2580 - DNA, 84 bp, Artificial
  Barcode component
  misc_feature (33)..(34): n is a, c, g, or t
  misc_feature (43)..(44): n is a, c, g, or t
  misc_feature (53)..(54): n is a, c, g, or t
tttttttaagcagtggtatcaacgcagagtacnncgtaatcgnnactacaggnntttttttttttttttttttttttttttttt

SEQ ID NO: 2581 - DNA, 84 bp, Artificial
  Barcode component
  misc_feature (33)..(34): n is a, c, g, or t
  misc_feature (43)..(44): n is a, c, g, or t
  misc_feature (53)..(54): n is a, c, g, or t
tttttttaagcagtggtatcaacgcagagtacnncgtaatcgnntacaggtcnntttttttttttttttttttttttttttttt

SEQ ID NO: 2582 - DNA, 84 bp, Artificial
  Barcode component
  misc_feature (33)..(34): n is a, c, g, or t
  misc_feature (43)..(44): n is a, c, g, or t
  misc_feature (53)..(54): n is a, c, g, or t
tttttttaagcagtggtatcaacgcagagtacnncgtaatcgnnctcacatgnntttttttttttttttttttttttttttttt

SEQ ID NO: 2583 - DNA, 84 bp, Artificial
  Barcode component
  misc_feature (33)..(34): n is a, c, g, or t
  misc_feature (43)..(44): n is a, c, g, or t
  misc_feature (53)..(54): n is a, c, g, or t
tttttttaagcagtggtatcaacgcagagtacnncgtaatcgnnactaggagnntttttttttttttttttttttttttttttt

SEQ ID NO: 2584 - DNA, 84 bp, Artificial
  Barcode component
  misc_feature (33)..(34): n is a, c, g, or t
  misc_feature (43)..(44): n is a, c, g, or t
  misc_feature (53)..(54): n is a, c, g, or t
tttttttaagcagtggtatcaacgcagagtacnncgtaatcgnnccatagganntttttttttttttttttttttttttttttt

SEQ ID NO: 2585 - DNA, 84 bp, Artificial
  Barcode component
  misc_feature (33)..(34): n is a, c, g, or t
  misc_feature (43)..(44): n is a, c, g, or t
  misc_feature (53)..(54): n is a, c, g, or t
tttttttaagcagtggtatcaacgcagagtacnncgtaatcgnnggagaatcnntttttttttttttttttttttttttttttt

SEQ ID NO: 2586 - DNA, 84 bp, Artificial
  Barcode component
  misc_feature (33)..(34): n is a, c, g, or t
  misc_feature (43)..(44): n is a, c, g, or t
  misc_feature (53)..(54): n is a, c, g, or t
tttttttaagcagtggtatcaacgcagagtacnncgtaatcgnngccaagaanntttttttttttttttttttttttttttttt

SEQ ID NO: 2587 - DNA, 84 bp, Artificial
  Barcode component
  misc_feature (33)..(34): n is a, c, g, or t
  misc_feature (43)..(44): n is a, c, g, or t
  misc_feature (53)..(54): n is a, c, g, or t
tttttttaagcagtggtatcaacgcagagtacnncgtaatcgnnaaggcaagnntttttttttttttttttttttttttttttt

SEQ ID NO: 2588 - DNA, 84 bp, Artificial
  Barcode component
  misc_feature (33)..(34): n is a, c, g, or t
  misc_feature (43)..(44): n is a, c, g, or t
  misc_feature (53)..(54): n is a, c, g, or t
tttttttaagcagtggtatcaacgcagagtacnncgtaatcgnnaatgtcgcnntttttttttttttttttttttttttttttt

SEQ ID NO: 2589 - DNA, 84 bp, Artificial
  Barcode component
  misc_feature (33)..(34): n is a, c, g, or t
  misc_feature (43)..(44): n is a, c, g, or t
  misc_feature (53)..(54): n is a, c, g, or t
tttttttaagcagtggtatcaacgcagagtacnncgtaatcgnnatggaaccnntttttttttttttttttttttttttttttt

SEQ ID NO: 2590 - DNA, 84 bp, Artificial
  Barcode component
  misc_feature (33)..(34): n is a, c, g, or t
  misc_feature (43)..(44): n is a, c, g, or t
  misc_feature (53)..(54): n is a, c, g, or t
tttttttaagcagtggtatcaacgcagagtacnncgtaatcgnnagaggcatnntttttttttttttttttttttttttttttt

SEQ ID NO: 2591 - DNA, 84 bp, Artificial
  Barcode component
  misc_feature (33)..(34): n is a, c, g, or t
  misc_feature (43)..(44): n is a, c, g, or t
  misc_feature (53)..(54): n is a, c, g, or t
tttttttaagcagtggtatcaacgcagagtacnncgtaatcgnntgcatagcnntttttttttttttttttttttttttttttt

SEQ ID NO: 2592 - DNA, 84 bp, Artificial
  Barcode component
  misc_feature (33)..(34): n is a, c, g, or t
  misc_feature (43)..(44): n is a, c, g, or t
  misc_feature (53)..(54): n is a, c, g, or t
tttttttaagcagtggtatcaacgcagagtacnncgtaatcgnnctaacgganntttttttttttttttttttttttttttttt

SEQ ID NO: 2593 - DNA, 84 bp, Artificial
  Barcode component
  misc_feature (33)..(34): n is a, c, g, or t
  misc_feature (43)..(44): n is a, c, g, or t
  misc_feature (53)..(54): n is a, c, g, or t
tttttttaagcagtggtatcaacgcagagtacnncgtaatcgnntatcgaggnntttttttttttttttttttttttttttttt

SEQ ID NO: 2594 - DNA, 84 bp, Artificial
  Barcode component
  misc_feature (33)..(34): n is a, c, g, or t
  misc_feature (43)..(44): n is a, c, g, or t
  misc_feature (53)..(54): n is a, c, g, or t
tttttttaagcagtggtatcaacgcagagtacnncgtaatcgnncatagcctnntttttttttttttttttttttttttttttt

SEQ ID NO: 2595 - DNA, 84 bp, Artificial
  Barcode component
  misc_feature (33)..(34): n is a, c, g, or t
  misc_feature (43)..(44): n is a, c, g, or t
  misc_feature (53)..(54): n is a, c, g, or t
tttttttaagcagtggtatcaacgcagagtacnncgtaatcgnnatcgagacnntttttttttttttttttttttttttttttt

SEQ ID NO: 2596 - DNA, 84 bp, Artificial
  Barcode component
  misc_feature (33)..(34): n is a, c, g, or t
  misc_feature (43)..(44): n is a, c, g, or t
  misc_feature (53)..(54): n is a, c, g, or t
tttttttaagcagtggtatcaacgcagagtacnncgtaatcgnnggaagagtnntttttttttttttttttttttttttttttt

SEQ ID NO: 2597 - DNA, 84 bp, Artificial
  Barcode component
  misc_feature (33)..(34): n is a, c, g, or t
  misc_feature (43)..(44): n is a, c, g, or t
  misc_feature (53)..(54): n is a, c, g, or t
tttttttaagcagtggtatcaacgcagagtacnncgtaatcgnnccaagtagnntttttttttttttttttttttttttttttt

SEQ ID NO: 2598 - DNA, 84 bp, Artificial
  Barcode component
  misc_feature (33)..(34): n is a, c, g, or t
  misc_feature (43)..(44): n is a, c, g, or t
  misc_feature (53)..(54): n is a, c, g, or t
tttttttaagcagtggtatcaacgcagagtacnncgtaatcgnnctgaacagnntttttttttttttttttttttttttttttt

SEQ ID NO: 2599 - DNA, 84 bp, Artificial
  Barcode component
  misc_feature (33)..(34): n is a, c, g, or t
  misc_feature (43)..(44): n is a, c, g, or t
  misc_feature (53)..(54): n is a, c, g, or t
tttttttaagcagtggtatcaacgcagagtacnncgtaatcgnngtaggttcnntttttttttttttttttttttttttttttt

SEQ ID NO: 2600 - DNA, 84 bp, Artificial
  Barcode component
  misc_feature (33)..(34): n is a, c, g, or t
  misc_feature (43)..(44): n is a, c, g, or t
  misc_feature (53)..(54): n is a, c, g, or t
tttttttaagcagtggtatcaacgcagagtacnncgtaatcgnngtatggacnntttttttttttttttttttttttttttttt

SEQ ID NO: 2601 - DNA, 84 bp, Artificial
  Barcode component
  misc_feature (33)..(34): n is a, c, g, or t
  misc_feature (43)..(44): n is a, c, g, or t
  misc_feature (53)..(54): n is a, c, g, or t
tttttttaagcagtggtatcaacgcagagtacnncgtaatcgnntcgcaacanntttttttttttttttttttttttttttttt

SEQ ID NO: 2602 - DNA, 84 bp, Artificial
  Barcode component
  misc_feature (33)..(34): n is a, c, g, or t
  misc_feature (43)..(44): n is a, c, g, or t
  misc_feature (53)..(54): n is a, c, g, or t
tttttttaagcagtggtatcaacgcagagtacnncgtaatcgnnccgctaatnntttttttttttttttttttttttttttttt

SEQ ID NO: 2603 - DNA, 84 bp, Artificial
  Barcode component
  misc_feature (33)..(34): n is a, c, g, or t
  misc_feature (43)..(44): n is a, c, g, or t
  misc_feature (53)..(54): n is a, c, g, or t
tttttttaagcagtggtatcaacgcagagtacnncgtaatcgnngattcgcanntttttttttttttttttttttttttttttt

SEQ ID NO: 2604 - DNA, 84 bp, Artificial
  Barcode component
  misc_feature (33)..(34): n is a, c, g, or t
  misc_feature (43)..(44): n is a, c, g, or t
  misc_feature (53)..(54): n is a, c, g, or t
tttttttaagcagtggtatcaacgcagagtacnncgtaatcgnncgatggaanntttttttttttttttttttttttttttttt

SEQ ID NO: 2605 - DNA, 84 bp, Artificial
  Barcode component
  misc_feature (33)..(34): n is a, c, g, or t
  misc_feature (43)..(44): n is a, c, g, or t
  misc_feature (53)..(54): n is a, c, g, or t
tttttttaagcagtggtatcaacgcagagtacnncgtaatcgnnagcaagganntttttttttttttttttttttttttttttt

SEQ ID NO: 2606 - DNA, 84 bp, Artificial
  Barcode component
  misc_feature (33)..(34): n is a, c, g, or t
  misc_feature (43)..(44): n is a, c, g, or t
  misc_feature (53)..(54): n is a, c, g, or t
tttttttaagcagtggtatcaacgcagagtacnncgtaatcgnncgtagcaanntttttttttttttttttttttttttttttt

SEQ ID NO: 2607 - DNA, 84 bp, Artificial
  Barcode component
  misc_feature (33)..(34): n is a, c, g, or t
  misc_feature (43)..(44): n is a, c, g, or t
  misc_feature (53)..(54): n is a, c, g, or t
tttttttaagcagtggtatcaacgcagagtacnncgtaatcgnntggcagtanntttttttttttttttttttttttttttttt

SEQ ID NO: 2608 - DNA, 84 bp, Artificial
  Barcode component
  misc_feature (33)..(34): n is a, c, g, or t
  misc_feature (43)..(44): n is a, c, g, or t
  misc_feature (53)..(54): n is a, c, g, or t
tttttttaagcagtggtatcaacgcagagtacnncgtaatcgnncggtagttnntttttttttttttttttttttttttttttt

SEQ ID NO: 2609 - DNA, 84 bp, Artificial
  Barcode component
  misc_feature (33)..(34): n is a, c, g, or t
  misc_feature (43)..(44): n is a, c, g, or t
  misc_feature (53)..(54): n is a, c, g, or t
tttttttaagcagtggtatcaacgcagagtacnncgtaatcgnntgacttcgnntttttttttttttttttttttttttttttt

SEQ ID NO: 2610 - DNA, 84 bp, Artificial
  Barcode component
  misc_feature (33)..(34): n is a, c, g, or t
  misc_feature (43)..(44): n is a, c, g, or t
  misc_feature (53)..(54): n is a, c, g, or t
tttttttaagcagtggtatcaacgcagagtacnncgtaatcgnngagtgcaanntttttttttttttttttttttttttttttt

SEQ ID NO: 2611 - DNA, 84 bp, Artificial
  Barcode component
  misc_feature (33)..(34): n is a, c, g, or t
  misc_feature (43)..(44): n is a, c, g, or t
  misc_feature (53)..(54): n is a, c, g, or t
tttttttaagcagtggtatcaacgcagagtacnncgtaatcgnnacggtaacnntttttttttttttttttttttttttttttt

SEQ ID NO: 2612 - DNA, 84 bp, Artificial
  Barcode component
  misc_feature (33)..(34): n is a, c, g, or t
  misc_feature (43)..(44): n is a, c, g, or t
  misc_feature (53)..(54): n is a, c, g, or t
tttttttaagcagtggtatcaacgcagagtacnncgtaatcgnnaagtggtgnntttttttttttttttttttttttttttttt

SEQ ID NO: 2613 - DNA, 84 bp, Artificial
  Barcode component
  misc_feature (33)..(34): n is a, c, g, or t
  misc_feature (43)..(44): n is a, c, g, or t
  misc_feature (53)..(54): n is a, c, g, or t
tttttttaagcagtggtatcaacgcagagtacnncgtaatcgnnggagacaanntttttttttttttttttttttttttttttt

SEQ ID NO: 2614 - DNA, 84 bp, Artificial
  Barcode component
  misc_feature (33)..(34): n is a, c, g, or t
  misc_feature (43)..(44): n is a, c, g, or t
  misc_feature (53)..(54): n is a, c, g, or t
tttttttaagcagtggtatcaacgcagagtacnncgtaatcgnntcaaggacnntttttttttttttttttttttttttttttt

SEQ ID NO: 2615 - DNA, 84 bp, Artificial
  Barcode component
  misc_feature (33)..(34): n is a, c, g, or t
  misc_feature (43)..(44): n is a, c, g, or t
  misc_feature (53)..(54): n is a, c, g, or t
tttttttaagcagtggtatcaacgcagagtacnncgtaatcgnnaagagagcnntttttttttttttttttttttttttttttt

SEQ ID NO: 2616 - DNA, 84 bp, Artificial
  Barcode component
  misc_feature (33)..(34): n is a, c, g, or t
  misc_feature (43)..(44): n is a, c, g, or t
  misc_feature (53)..(54): n is a, c, g, or t
tttttttaagcagtggtatcaacgcagagtacnncgtaatcgnncgagagatnntttttttttttttttttttttttttttttt

SEQ ID NO: 2617 - DNA, 84 bp, Artificial
  Barcode component
  misc_feature (33)..(34): n is a, c, g, or t
  misc_feature (43)..(44): n is a, c, g, or t
  misc_feature (53)..(54): n is a, c, g, or t
tttttttaagcagtggtatcaacgcagagtacnncgtaatcgnnacagatggnntttttttttttttttttttttttttttttt

SEQ ID NO: 2618 - DNA, 84 bp, Artificial
  Barcode component
  misc_feature (33)..(34): n is a, c, g, or t
  misc_feature (43)..(44): n is a, c, g, or t
  misc_feature (53)..(54): n is a, c, g, or t
tttttttaagcagtggtatcaacgcagagtacnncgtaatcgnnaggagtcanntttttttttttttttttttttttttttttt

SEQ ID NO: 2619 - DNA, 84 bp, Artificial
  Barcode component
  misc_feature (33)..(34): n is a, c, g, or t
  misc_feature (43)..(44): n is a, c, g, or t
  misc_feature (53)..(54): n is a, c, g, or t
tttttttaagcagtggtatcaacgcagagtacnncgtaatcgnncgtgttacnntttttttttttttttttttttttttttttt

SEQ ID NO: 2620 - DNA, 84 bp, Artificial
  Barcode component
  misc_feature (33)..(34): n is a, c, g, or t
  misc_feature (43)..(44): n is a, c, g, or t
  misc_feature (53)..(54): n is a, c, g, or t
tttttttaagcagtggtatcaacgcagagtacnncgtaatcgnntagtgtgcnntttttttttttttttttttttttttttttt

SEQ ID NO: 2621 - DNA, 84 bp, Artificial
  Barcode component
  misc_feature (33)..(34): n is a, c, g, or t
  misc_feature (43)..(44): n is a, c, g, or t
  misc_feature (53)..(54): n is a, c, g, or t
tttttttaagcagtggtatcaacgcagagtacnncgtaatcgnnctcatgacnntttttttttttttttttttttttttttttt

SEQ ID NO: 2622 - DNA, 84 bp, Artificial
  Barcode component
  misc_feature (33)..(34): n is a, c, g, or t
  misc_feature (43)..(44): n is a, c, g, or t
  misc_feature (53)..(54): n is a, c, g, or t
tttttttaagcagtggtatcaacgcagagtacnncgtaatcgnngtatccagnntttttttttttttttttttttttttttttt

SEQ ID NO: 2623 - DNA, 84 bp, Artificial
  Barcode component
  misc_feature (33)..(34): n is a, c, g, or t
  misc_feature (43)..(44): n is a, c, g, or t
  misc_feature (53)..(54): n is a, c, g, or t
tttttttaagcagtggtatcaacgcagagtacnncgtaatcgnnacgcctatnntttttttttttttttttttttttttttttt

SEQ ID NO: 2624 - DNA, 84 bp, Artificial
  Barcode component
  misc_feature (33)..(34): n is a, c, g, or t
  misc_feature (43)..(44): n is a, c, g, or t
  misc_feature (53)..(54): n is a, c, g, or t
tttttttaagcagtggtatcaacgcagagtacnncgtaatcgnnaacgacctnntttttttttttttttttttttttttttttt

SEQ ID NO: 2625 - DNA, 84 bp, Artificial
  Barcode component
  misc_feature (33)..(34): n is a, c, g, or t
  misc_feature (43)..(44): n is a, c, g, or t
  misc_feature (53)..(54): n is a, c, g, or t
tttttttaagcagtggtatcaacgcagagtacnncgtaatcgnnatcaggctnntttttttttttttttttttttttttttttt

SEQ ID NO: 2626 - DNA, 84 bp, Artificial
  Barcode component
  misc_feature (33)..(34): n is a, c, g, or t
  misc_feature (43)..(44): n is a, c, g, or t
  misc_feature (53)..(54): n is a, c, g, or t
tttttttaagcagtggtatcaacgcagagtacnncgtaatcgnncaagttcgnntttttttttttttttttttttttttttttt

SEQ ID NO: 2627 - DNA, 84 bp, Artificial
  Barcode component
  misc_feature (33)..(34): n is a, c, g, or t
  misc_feature (43)..(44): n is a, c, g, or t
  misc_feature (53)..(54): n is a, c, g, or t
tttttttaagcagtggtatcaacgcagagtacnncgtaatcgnntagccaganntttttttttttttttttttttttttttttt

SEQ ID NO: 2628 - DNA, 84 bp, Artificial
  Barcode component
  misc_feature (33)..(34): n is a, c, g, or t
  misc_feature (43)..(44): n is a, c, g, or t
  misc_feature (53)..(54): n is a, c, g, or t
tttttttaagcagtggtatcaacgcagagtacnncgtaatcgnncaatcacgnntttttttttttttttttttttttttttttt

SEQ ID NO: 2629 - DNA, 84 bp, Artificial
  Barcode component
  misc_feature (33)..(34): n is a, c, g, or t
  misc_feature (43)..(44): n is a, c, g, or t
  misc_feature (53)..(54): n is a, c, g, or t
tttttttaagcagtggtatcaacgcagagtacnncgtaatcgnngcaacaagnntttttttttttttttttttttttttttttt

SEQ ID NO: 2630 - DNA, 84 bp, Artificial
  Barcode component
  misc_feature (33)..(34): n is a, c, g, or t
  misc_feature (43)..(44): n is a, c, g, or t
  misc_feature (53)..(54): n is a, c, g, or t
tttttttaagcagtggtatcaacgcagagtacnncgtaatcgnncacgacaanntttttttttttttttttttttttttttttt

SEQ ID NO: 2631 - DNA, 84 bp, Artificial
  Barcode component
  misc_feature (33)..(34): n is a, c, g, or t
  misc_feature (43)..(44): n is a, c, g, or t
  misc_feature (53)..(54): n is a, c, g, or t
tttttttaagcagtggtatcaacgcagagtacnncgtaatcgnntacggaganntttttttttttttttttttttttttttttt

SEQ ID NO: 2632 - DNA, 84 bp, Artificial
  Barcode component
  misc_feature (33)..(34): n is a, c, g, or t
  misc_feature (43)..(44): n is a, c, g, or t
  misc_feature (53)..(54): n is a, c, g, or t
tttttttaagcagtggtatcaacgcagagtacnncgtaatcgnncgacaaganntttttttttttttttttttttttttttttt

SEQ ID NO: 2633 - DNA, 84 bp, Artificial
  Barcode component
  misc_feature (33)..(34): n is a, c, g, or t
  misc_feature (43)..(44): n is a, c, g, or t
  misc_feature (53)..(54): n is a, c, g, or t
tttttttaagcagtggtatcaacgcagagtacnncgtaatcgnncgaagtganntttttttttttttttttttttttttttttt

SEQ ID NO: 2634 - DNA, 84 bp, Artificial
  Barcode component
  misc_feature (33)..(34): n is a, c, g, or t
  misc_feature (43)..(44): n is a, c, g, or t
  misc_feature (53)..(54): n is a, c, g, or t
tttttttaagcagtggtatcaacgcagagtacnncgtaatcgnnagctggtanntttttttttttttttttttttttttttttt

SEQ ID NO: 2635 - DNA, 84 bp, Artificial
  Barcode component
  misc_feature (33)..(34): n is a, c, g, or t
  misc_feature (43)..(44): n is a, c, g, or t
  misc_feature (53)..(54): n is a, c, g, or t
tttttttaagcagtggtatcaacgcagagtacnncgtaatcgnnaactaggcnntttttttttttttttttttttttttttttt

SEQ ID NO: 2636 - DNA, 84 bp, Artificial
  Barcode component
  misc_feature (33)..(34): n is a, c, g, or t
  misc_feature (43)..(44): n is a, c, g, or t
  misc_feature (53)..(54): n is a, c, g, or t
tttttttaagcagtggtatcaacgcagagtacnncgtaatcgnncagcaagtnntttttttttttttttttttttttttttttt

SEQ ID NO: 2637 - DNA, 84 bp, Artificial
  Barcode component
  misc_feature (33)..(34): n is a, c, g, or t
  misc_feature (43)..(44): n is a, c, g, or t
  misc_feature (53)..(54): n is a, c, g, or t
tttttttaagcagtggtatcaacgcagagtacnncgtaatcgnnacgaggtanntttttttttttttttttttttttttttttt

SEQ ID NO: 2638 - DNA, 84 bp, Artificial
  Barcode component
  misc_feature (33)..(34): n is a, c, g, or t
  misc_feature (43)..(44): n is a, c, g, or t
  misc_feature (53)..(54): n is a, c, g, or t
tttttttaagcagtggtatcaacgcagagtacnncgtaatcgnncatcttccnntttttttttttttttttttttttttttttt

SEQ ID NO: 2639 - DNA, 84 bp, Artificial
  Barcode component
  misc_feature (33)..(34): n is a, c, g, or t
  misc_feature (43)..(44): n is a, c, g, or t
  misc_feature (53)..(54): n is a, c, g, or t
tttttttaagcagtggtatcaacgcagagtacnncgtaatcgnncctgaatcnntttttttttttttttttttttttttttttt

SEQ ID NO: 2640 - DNA, 84 bp, Artificial
  Barcode component
  misc_feature (33)..(34): n is a, c, g, or t
  misc_feature (43)..(44): n is a, c, g, or t
  misc_feature (53)..(54): n is a, c, g, or t
tttttttaagcagtggtatcaacgcagagtacnncgtaatcgnntgcagactnntttttttttttttttttttttttttttttt

SEQ ID NO: 2641 - DNA, 84 bp, Artificial
  Barcode component
  misc_feature (33)..(34): n is a, c, g, or t
  misc_feature (43)..(44): n is a, c, g, or t
  misc_feature (53)..(54): n is a, c, g, or t
tttttttaagcagtggtatcaacgcagagtacnncgtaatcgnnagatgtggnntttttttttttttttttttttttttttttt

SEQ ID NO: 2642 - DNA, 84 bp, Artificial
  Barcode component
  misc_feature (33)..(34): n is a, c, g, or t
  misc_feature (43)..(44): n is a, c, g, or t
  misc_feature (53)..(54): n is a, c, g, or t
tttttttaagcagtggtatcaacgcagagtacnncgtaatcgnnagttcgacnntttttttttttttttttttttttttttttt

SEQ ID NO: 2643 - DNA, 84 bp, Artificial
  Barcode component
  misc_feature (33)..(34): n is a, c, g, or t
  misc_feature (43)..(44): n is a, c, g, or t
  misc_feature (53)..(54): n is a, c, g, or t
tttttttaagcagtggtatcaacgcagagtacnncgtaatcgnnacaacctcnntttttttttttttttttttttttttttttt

SEQ ID NO: 2644 - DNA, 84 bp, Artificial
  Barcode component
  misc_feature (33)..(34): n is a, c, g, or t
  misc_feature (43)..(44): n is a, c, g, or t
  misc_feature (53)..(54): n is a, c, g, or t
tttttttaagcagtggtatcaacgcagagtacnncgtaatcgnncatggtagnntttttttttttttttttttttttttttttt

SEQ ID NO: 2645 - DNA, 84 bp, Artificial
  Barcode component
  misc_feature (33)..(34): n is a, c, g, or t
  misc_feature (43)..(44): n is a, c, g, or t
  misc_feature (53)..(54): n is a, c, g, or t
tttttttaagcagtggtatcaacgcagagtacnncgtaatcgnncgtatctcnntttttttttttttttttttttttttttttt

SEQ ID NO: 2646 - DNA, 84 bp, Artificial
  Barcode component
  misc_feature (33)..(34): n is a, c, g, or t
  misc_feature (43)..(44): n is a, c, g, or t
  misc_feature (53)..(54): n is a, c, g, or t
tttttttaagcagtggtatcaacgcagagtacnncgtaatcgnncctagttcnntttttttttttttttttttttttttttttt

SEQ ID NO: 2647 - DNA, 84 bp, Artificial
  Barcode component
  misc_feature (33)..(34): n is a, c, g, or t
  misc_feature (43)..(44): n is a, c, g, or t
  misc_feature (53)..(54): n is a, c, g, or t
tttttttaagcagtggtatcaacgcagagtacnncgtaatcgnncaagagtcnntttttttttttttttttttttttttttttt

SEQ ID NO: 2648 - DNA, 84 bp, Artificial
  Barcode component
  misc_feature (33)..(34): n is a, c, g, or t
  misc_feature (43)..(44): n is a, c, g, or t
  misc_feature (53)..(54): n is a, c, g, or t
tttttttaagcagtggtatcaacgcagagtacnntgagaaggnnaatcggcanntttttttttttttttttttttttttttttt

SEQ ID NO: 2649 - DNA, 84 bp, Artificial
  Barcode component
  misc_feature (33)..(34): n is a, c, g, or t
  misc_feature (43)..(44): n is a, c, g, or t
  misc_feature (53)..(54): n is a, c, g, or t
tttttttaagcagtggtatcaacgcagagtacnntgagaaggnntacggcatnntttttttttttttttttttttttttttttt

SEQ ID NO: 2650 - DNA, 84 bp, Artificial
  Barcode component
  misc_feature (33)..(34): n is a, c, g, or t
  misc_feature (43)..(44): n is a, c, g, or t
  misc_feature (53)..(54): n is a, c, g, or t
tttttttaagcagtggtatcaacgcagagtacnntgagaaggnnttggatcgnntttttttttttttttttttttttttttttt

SEQ ID NO: 2651 - DNA, 84 bp, Artificial
  Barcode component
  misc_feature (33)..(34): n is a, c, g, or t
  misc_feature (43)..(44): n is a, c, g, or t
  misc_feature (53)..(54): n is a, c, g, or t
tttttttaagcagtggtatcaacgcagagtacnntgagaaggnntggaacganntttttttttttttttttttttttttttttt

SEQ ID NO: 2652 - DNA, 84 bp, Artificial
  Barcode component
  misc_feature (33)..(34): n is a, c, g, or t
  misc_feature (43)..(44): n is a, c, g, or t
  misc_feature (53)..(54): n is a, c, g, or t
tttttttaagcagtggtatcaacgcagagtacnntgagaaggnnggcaatcanntttttttttttttttttttttttttttttt

SEQ ID NO: 2653 - DNA, 84 bp, Artificial
  Barcode component
  misc_feature (33)..(34): n is a, c, g, or t
  misc_feature (43)..(44): n is a, c, g, or t
  misc_feature (53)..(54): n is a, c, g, or t
tttttttaagcagtggtatcaacgcagagtacnntgagaaggnngaatccganntttttttttttttttttttttttttttttt

SEQ ID NO: 2654 - DNA, 84 bp, Artificial
  Barcode component
  misc_feature (33)..(34): n is a, c, g, or t
  misc_feature (43)..(44): n is a, c, g, or t
  misc_feature (53)..(54): n is a, c, g, or t
tttttttaagcagtggtatcaacgcagagtacnntgagaaggnnttacggtgnntttttttttttttttttttttttttttttt

SEQ ID NO: 2655 - DNA, 84 bp, Artificial
  Barcode component
  misc_feature (33)..(34): n is a, c, g, or t
  misc_feature (43)..(44): n is a, c, g, or t
  misc_feature (53)..(54): n is a, c, g, or t
tttttttaagcagtggtatcaacgcagagtacnntgagaaggnncatatcggnntttttttttttttttttttttttttttttt

SEQ ID NO: 2656 - DNA, 84 bp, Artificial
  Barcode component
  misc_feature (33)..(34): n is a, c, g, or t
  misc_feature (43)..(44): n is a, c, g, or t
  misc_feature (53)..(54): n is a, c, g, or t
tttttttaagcagtggtatcaacgcagagtacnntgagaaggnncttcggtanntttttttttttttttttttttttttttttt

SEQ ID NO: 2657 - DNA, 84 bp, Artificial
  Barcode component
  misc_feature (33)..(34): n is a, c, g, or t
  misc_feature (43)..(44): n is a, c, g, or t
  misc_feature (53)..(54): n is a, c, g, or t
tttttttaagcagtggtatcaacgcagagtacnntgagaaggnntcctaacgnntttttttttttttttttttttttttttttt

SEQ ID NO: 2658 - DNA, 84 bp, Artificial
  Barcode component
  misc_feature (33)..(34): n is a, c, g, or t
  misc_feature (43)..(44): n is a, c, g, or t
  misc_feature (53)..(54): n is a, c, g, or t
tttttttaagcagtggtatcaacgcagagtacnntgagaaggnngtaagccanntttttttttttttttttttttttttttttt

SEQ ID NO: 2659 - DNA, 84 bp, Artificial
  Barcode component
  misc_feature (33)..(34): n is a, c, g, or t
  misc_feature (43)..(44): n is a, c, g, or t
  misc_feature (53)..(54): n is a, c, g, or t
tttttttaagcagtggtatcaacgcagagtacnntgagaaggnntaaggtggnntttttttttttttttttttttttttttttt

SEQ ID NO: 2660 - DNA, 84 bp, Artificial
  Barcode component
  misc_feature (33)..(34): n is a, c, g, or t
  misc_feature (43)..(44): n is a, c, g, or t
  misc_feature (53)..(54): n is a, c, g, or t
tttttttaagcagtggtatcaacgcagagtacnntgagaaggnnggtaagctnntttttttttttttttttttttttttttttt

SEQ ID NO: 2661 - DNA, 84 bp, Artificial
  Barcode component
  misc_feature (33)..(34): n is a, c, g, or t
  misc_feature (43)..(44): n is a, c, g, or t
  misc_feature (53)..(54): n is a, c, g, or t
tttttttaagcagtggtatcaacgcagagtacnntgagaaggnntgtgtcganntttttttttttttttttttttttttttttt

SEQ ID NO: 2662 - DNA, 84 bp, Artificial
  Barcode component
  misc_feature (33)..(34): n is a, c, g, or t
  misc_feature (43)..(44): n is a, c, g, or t
  misc_feature (53)..(54): n is a, c, g, or t
tttttttaagcagtggtatcaacgcagagtacnntgagaaggnngagcatganntttttttttttttttttttttttttttttt

SEQ ID NO: 2663 - DNA, 84 bp, Artificial
  Barcode component
  misc_feature (33)..(34): n is a, c, g, or t
  misc_feature (43)..(44): n is a, c, g, or t
  misc_feature (53)..(54): n is a, c, g, or t
tttttttaagcagtggtatcaacgcagagtacnntgagaaggnntcgaagtcnntttttttttttttttttttttttttttttt

SEQ ID NO: 2664 - DNA, 84 bp, Artificial
  Barcode component
  misc_feature (33)..(34): n is a, c, g, or t
  misc_feature (43)..(44): n is a, c, g, or t
  misc_feature (53)..(54): n is a, c, g, or t
tttttttaagcagtggtatcaacgcagagtacnntgagaaggnnggtgaacanntttttttttttttttttttttttttttttt

SEQ ID NO: 2665 - DNA, 84 bp, Artificial
  Barcode component
  misc_feature (33)..(34): n is a, c, g, or t
  misc_feature (43)..(44): n is a, c, g, or t
  misc_feature (53)..(54): n is a, c, g, or t
tttttttaagcagtggtatcaacgcagagtacnntgagaaggnnacatgcacnntttttttttttttttttttttttttttttt

SEQ ID NO: 2666 - DNA, 84 bp, Artificial
  Barcode component
  misc_feature (33)..(34): n is a, c, g, or t
  misc_feature (43)..(44): n is a, c, g, or t
  misc_feature (53)..(54): n is a, c, g, or t
tttttttaagcagtggtatcaacgcagagtacnntgagaaggnnccaacagtnntttttttttttttttttttttttttttttt

SEQ ID NO: 2667 - DNA, 84 bp, Artificial
  Barcode component
  misc_feature (33)..(34): n is a, c, g, or t
  misc_feature (43)..(44): n is a, c, g, or t
  misc_feature (53)..(54): n is a, c, g, or t
tttttttaagcagtggtatcaacgcagagtacnntgagaaggnnagaacagcnntttttttttttttttttttttttttttttt

SEQ ID NO: 2668 - DNA, 84 bp, Artificial
  Barcode component
  misc_feature (33)..(34): n is a, c, g, or t
  misc_feature (43)..(44): n is a, c, g, or t
  misc_feature (53)..(54): n is a, c, g, or t
tttttttaagcagtggtatcaacgcagagtacnntgagaaggnngaacacgtnntttttttttttttttttttttttttttttt

SEQ ID NO: 2669 - DNA, 84 bp, Artificial
  Barcode component
  misc_feature (33)..(34): n is a, c, g, or t
  misc_feature (43)..(44): n is a, c, g, or t
  misc_feature (53)..(54): n is a, c, g, or t
tttttttaagcagtggtatcaacgcagagtacnntgagaaggnnggtcttcanntttttttttttttttttttttttttttttt

SEQ ID NO: 2670 - DNA, 84 bp, Artificial
  Barcode component
  misc_feature (33)..(34): n is a, c, g, or t
  misc_feature (43)..(44): n is a, c, g, or t
  misc_feature (53)..(54): n is a, c, g, or t
tttttttaagcagtggtatcaacgcagagtacnntgagaaggnnaggttcagnntttttttttttttttttttttttttttttt

SEQ ID NO: 2671 - DNA, 84 bp, Artificial
  Barcode component
  misc_feature (33)..(34): n is a, c, g, or t
  misc_feature (43)..(44): n is a, c, g, or t
  misc_feature (53)..(54): n is a, c, g, or t
tttttttaagcagtggtatcaacgcagagtacnntgagaaggnnctagagcanntttttttttttttttttttttttttttttt

SEQ ID NO: 2672 - DNA, 84 bp, Artificial
  Barcode component
  misc_feature (33)..(34): n is a, c, g, or t
  misc_feature (43)..(44): n is a, c, g, or t
  misc_feature (53)..(54): n is a, c, g, or t
tttttttaagcagtggtatcaacgcagagtacnntgagaaggnncttctagcnntttttttttttttttttttttttttttttt

SEQ ID NO: 2673 - DNA, 84 bp, Artificial
  Barcode component
  misc_feature (33)..(34): n is a, c, g, or t
  misc_feature (43)..(44): n is a, c, g, or t
  misc_feature (53)..(54): n is a, c, g, or t
tttttttaagcagtggtatcaacgcagagtacnntgagaaggnngagtaacgnntttttttttttttttttttttttttttttt

SEQ ID NO: 2674 - DNA, 84 bp, Artificial
  Barcode component
  misc_feature (33)..(34): n is a, c, g, or t
  misc_feature (43)..(44): n is a, c, g, or t
  misc_feature (53)..(54): n is a, c, g, or t
tttttttaagcagtggtatcaacgcagagtacnntgagaaggnnctaagaggnntttttttttttttttttttttttttttttt

SEQ ID NO: 2675 - DNA, 84 bp, Artificial
  Barcode component
  misc_feature (33)..(34): n is a, c, g, or t
  misc_feature (43)..(44): n is a, c, g, or t
  misc_feature (53)..(54): n is a, c, g, or t
tttttttaagcagtggtatcaacgcagagtacnntgagaaggnnacgtgtagnntttttttttttttttttttttttttttttt

SEQ ID NO: 2676 - DNA, 84 bp, Artificial
  Barcode component
  misc_feature (33)..(34): n is a, c, g, or t
  misc_feature (43)..(44): n is a, c, g, or t
  misc_feature (53)..(54): n is a, c, g, or t
tttttttaagcagtggtatcaacgcagagtacnntgagaaggnnactacaggnntttttttttttttttttttttttttttttt

SEQ ID NO: 2677 - DNA, 84 bp, Artificial
  Barcode component
  misc_feature (33)..(34): n is a, c, g, or t
  misc_feature (43)..(44): n is a, c, g, or t
  misc_feature (53)..(54): n is a, c, g, or t
tttttttaagcagtggtatcaacgcagagtacnntgagaaggnntacaggtcnntttttttttttttttttttttttttttttt

SEQ ID NO: 2678 - DNA, 84 bp, Artificial
  Barcode component
  misc_feature (33)..(34): n is a, c, g, or t
  misc_feature (43)..(44): n is a, c, g, or t
  misc_feature (53)..(54): n is a, c, g, or t
tttttttaagcagtggtatcaacgcagagtacnntgagaaggnnctcacatgnntttttttttttttttttttttttttttttt

SEQ ID NO: 2679 - DNA, 84 bp, Artificial
  Barcode component
  misc_feature (33)..(34): n is a, c, g, or t
  misc_feature (43)..(44): n is a, c, g, or t
  misc_feature (53)..(54): n is a, c, g, or t
tttttttaagcagtggtatcaacgcagagtacnntgagaaggnnactaggagnntttttttttttttttttttttttttttttt

SEQ ID NO: 2680 - DNA, 84 bp, Artificial
  Barcode component
  misc_feature (33)..(34): n is a, c, g, or t
  misc_feature (43)..(44): n is a, c, g, or t
  misc_feature (53)..(54): n is a, c, g, or t
tttttttaagcagtggtatcaacgcagagtacnntgagaaggnnccatagganntttttttttttttttttttttttttttttt

SEQ ID NO: 2681 - DNA, 84 bp, Artificial
  Barcode component
  misc_feature (33)..(34): n is a, c, g, or t
  misc_feature (43)..(44): n is a, c, g, or t
  misc_feature (53)..(54): n is a, c, g, or t
tttttttaagcagtggtatcaacgcagagtacnntgagaaggnnggagaatcnntttttttttttttttttttttttttttttt

SEQ ID NO: 2682 - DNA, 84 bp, Artificial
  Barcode component
  misc_feature (33)..(34): n is a, c, g, or t
  misc_feature (43)..(44): n is a, c, g, or t
  misc_feature (53)..(54): n is a, c, g, or t
tttttttaagcagtggtatcaacgcagagtacnntgagaaggnngccaagaanntttttttttttttttttttttttttttttt

SEQ ID NO: 2683 - DNA, 84 bp, Artificial
  Barcode component
  misc_feature (33)..(34): n is a, c, g, or t
  misc_feature (43)..(44): n is a, c, g, or t
  misc_feature (53)..(54): n is a, c, g, or t
tttttttaagcagtggtatcaacgcagagtacnntgagaaggnnaaggcaagnntttttttttttttttttttttttttttttt

SEQ ID NO: 2684 - DNA, 84 bp, Artificial
  Barcode component
  misc_feature (33)..(34): n is a, c, g, or t
  misc_feature (43)..(44): n is a, c, g, or t
  misc_feature (53)..(54): n is a, c, g, or t
tttttttaagcagtggtatcaacgcagagtacnntgagaaggnnaatgtcgcnntttttttttttttttttttttttttttttt

SEQ ID NO: 2685 - DNA, 84 bp, Artificial
  Barcode component
  misc_feature (33)..(34): n is a, c, g, or t
  misc_feature (43)..(44): n is a, c, g, or t
  misc_feature (53)..(54): n is a, c, g, or t
tttttttaagcagtggtatcaacgcagagtacnntgagaaggnnatggaaccnntttttttttttttttttttttttttttttt

SEQ ID NO: 2686 - DNA, 84 bp, Artificial
  Barcode component
  misc_feature (33)..(34): n is a, c, g, or t
  misc_feature (43)..(44): n is a, c, g, or t
  misc_feature (53)..(54): n is a, c, g, or t
tttttttaagcagtggtatcaacgcagagtacnntgagaaggnnagaggcatnntttttttttttttttttttttttttttttt

SEQ ID NO: 2687 - DNA, 84 bp, Artificial
  Barcode component
  misc_feature (33)..(34): n is a, c, g, or t
  misc_feature (43)..(44): n is a, c, g, or t
  misc_feature (53)..(54): n is a, c, g, or t
tttttttaagcagtggtatcaacgcagagtacnntgagaaggnntgcatagcnntttttttttttttttttttttttttttttt

SEQ ID NO: 2688 - DNA, 84 bp, Artificial
  Barcode component
  misc_feature (33)..(34): n is a, c, g, or t
  misc_feature (43)..(44): n is a, c, g, or t
  misc_feature (53)..(54): n is a, c, g, or t
tttttttaagcagtggtatcaacgcagagtacnntgagaaggnnctaacgganntttttttttttttttttttttttttttttt

SEQ ID NO: 2689 - DNA, 84 bp, Artificial
  Barcode component
  misc_feature (33)..(34): n is a, c, g, or t
  misc_feature (43)..(44): n is a, c, g, or t
  misc_feature (53)..(54): n is a, c, g, or t
tttttttaagcagtggtatcaacgcagagtacnntgagaaggnntatcgaggnntttttttttttttttttttttttttttttt

SEQ ID NO: 2690 - DNA, 84 bp, Artificial
  Barcode component
  misc_feature (33)..(34): n is a, c, g, or t
  misc_feature (43)..(44): n is a, c, g, or t
  misc_feature (53)..(54): n is a, c, g, or t
tttttttaagcagtggtatcaacgcagagtacnntgagaaggnncatagcctnntttttttttttttttttttttttttttttt

SEQ ID NO: 2691 - DNA, 84 bp, Artificial
  Barcode component
  misc_feature (33)..(34): n is a, c, g, or t
  misc_feature (43)..(44): n is a, c, g, or t
  misc_feature (53)..(54): n is a, c, g, or t
tttttttaagcagtggtatcaacgcagagtacnntgagaaggnnatcgagacnntttttttttttttttttttttttttttttt

SEQ ID NO: 2692 - DNA, 84 bp, Artificial
  Barcode component
  misc_feature (33)..(34): n is a, c, g, or t
  misc_feature (43)..(44): n is a, c, g, or t
  misc_feature (53)..(54): n is a, c, g, or t
tttttttaagcagtggtatcaacgcagagtacnntgagaaggnnggaagagtnntttttttttttttttttttttttttttttt

SEQ ID NO: 2693 - DNA, 84 bp, Artificial
  Barcode component
  misc_feature (33)..(34): n is a, c, g, or t
  misc_feature (43)..(44): n is a, c, g, or t
  misc_feature (53)..(54): n is a, c, g, or t
tttttttaagcagtggtatcaacgcagagtacnntgagaaggnnccaagtagnntttttttttttttttttttttttttttttt

SEQ ID NO: 2694 - DNA, 84 bp, Artificial
  Barcode component
  misc_feature (33)..(34): n is a, c, g, or t
  misc_feature (43)..(44): n is a, c, g, or t
  misc_feature (53)..(54): n is a, c, g, or t
tttttttaagcagtggtatcaacgcagagtacnntgagaaggnnctgaacagnntttttttttttttttttttttttttttttt

SEQ ID NO: 2695 - DNA, 84 bp, Artificial
  Barcode component
  misc_feature (33)..(34): n is a, c, g, or t
  misc_feature (43)..(44): n is a, c, g, or t
  misc_feature (53)..(54): n is a, c, g, or t
tttttttaagcagtggtatcaacgcagagtacnntgagaaggnngtaggttcnntttttttttttttttttttttttttttttt

SEQ ID NO: 2696 - DNA, 84 bp, Artificial
  Barcode component
  misc_feature (33)..(34): n is a, c, g, or t
  misc_feature (43)..(44): n is a, c, g, or t
  misc_feature (53)..(54): n is a, c, g, or t
tttttttaagcagtggtatcaacgcagagtacnntgagaaggnngtatggacnntttttttttttttttttttttttttttttt

SEQ ID NO: 2697 - DNA, 84 bp, Artificial
  Barcode component
  misc_feature (33)..(34): n is a, c, g, or t
  misc_feature (43)..(44): n is a, c, g, or t
  misc_feature (53)..(54): n is a, c, g, or t
tttttttaagcagtggtatcaacgcagagtacnntgagaaggnntcgcaacanntttttttttttttttttttttttttttttt

SEQ ID NO: 2698 - DNA, 84 bp, Artificial
  Barcode component
  misc_feature (33)..(34): n is a, c, g, or t
  misc_feature (43)..(44): n is a, c, g, or t
  misc_feature (53)..(54): n is a, c, g, or t
tttttttaagcagtggtatcaacgcagagtacnntgagaaggnnccgctaatnntttttttttttttttttttttttttttttt

SEQ ID NO: 2699 - DNA, 84 bp, Artificial
  Barcode component
  misc_feature (33)..(34): n is a, c, g, or t
  misc_feature (43)..(44): n is a, c, g, or t
  misc_feature (53)..(54): n is a, c, g, or t
tttttttaagcagtggtatcaacgcagagtacnntgagaaggnngattcgcanntttttttttttttttttttttttttttttt

SEQ ID NO: 2700 - DNA, 84 bp, Artificial
  Barcode component
  misc_feature (33)..(34): n is a, c, g, or t
  misc_feature (43)..(44): n is a, c, g, or t
  misc_feature (53)..(54): n is a, c, g, or t
tttttttaagcagtggtatcaacgcagagtacnntgagaaggnncgatggaanntttttttttttttttttttttttttttttt

SEQ ID NO: 2701 - DNA, 84 bp, Artificial
  Barcode component
  misc_feature (33)..(34): n is a, c, g, or t
  misc_feature (43)..(44): n is a, c, g, or t
  misc_feature (53)..(54): n is a, c, g, or t
tttttttaagcagtggtatcaacgcagagtacnntgagaaggnnagcaagganntttttttttttttttttttttttttttttt

SEQ ID NO: 2702 - DNA, 84 bp, Artificial
  Barcode component
  misc_feature (33)..(34): n is a, c, g, or t
  misc_feature (43)..(44): n is a, c, g, or t
  misc_feature (53)..(54): n is a, c, g, or t
tttttttaagcagtggtatcaacgcagagtacnntgagaaggnncgtagcaanntttttttttttttttttttttttttttttt

SEQ ID NO: 2703 - DNA, 84 bp, Artificial
  Barcode component
  misc_feature (33)..(34): n is a, c, g, or t
  misc_feature (43)..(44): n is a, c, g, or t
  misc_feature (53)..(54): n is a, c, g, or t
tttttttaagcagtggtatcaacgcagagtacnntgagaaggnntggcagtanntttttttttttttttttttttttttttttt

SEQ ID NO: 2704 - DNA, 84 bp, Artificial
  Barcode component
  misc_feature (33)..(34): n is a, c, g, or t
  misc_feature (43)..(44): n is a, c, g, or t
  misc_feature (53)..(54): n is a, c, g, or t
tttttttaagcagtggtatcaacgcagagtacnntgagaaggnncggtagttnntttttttttttttttttttttttttttttt

SEQ ID NO: 2705 - DNA, 84 bp, Artificial
  Barcode component
  misc_feature (33)..(34): n is a, c, g, or t
  misc_feature (43)..(44): n is a, c, g, or t
  misc_feature (53)..(54): n is a, c, g, or t
tttttttaagcagtggtatcaacgcagagtacnntgagaaggnntgacttcgnntttttttttttttttttttttttttttttt

SEQ ID NO: 2706 - DNA, 84 bp, Artificial
  Barcode component
  misc_feature (33)..(34): n is a, c, g, or t
  misc_feature (43)..(44): n is a, c, g, or t
  misc_feature (53)..(54): n is a, c, g, or t
tttttttaagcagtggtatcaacgcagagtacnntgagaaggnngagtgcaanntttttttttttttttttttttttttttttt

SEQ ID NO: 2707 - DNA, 84 bp, Artificial
  Barcode component
  misc_feature (33)..(34): n is a, c, g, or t
  misc_feature (43)..(44): n is a, c, g, or t
  misc_feature (53)..(54): n is a, c, g, or t
tttttttaagcagtggtatcaacgcagagtacnntgagaaggnnacggtaacnntttttttttttttttttttttttttttttt

SEQ ID NO: 2708 - DNA, 84 bp, Artificial
  Barcode component
  misc_feature (33)..(34): n is a, c, g, or t
  misc_feature (43)..(44): n is a, c, g, or t
  misc_feature (53)..(54): n is a, c, g, or t
tttttttaagcagtggtatcaacgcagagtacnntgagaaggnnaagtggtgnntttttttttttttttttttttttttttttt

SEQ ID NO: 2709 - DNA, 84 bp, Artificial
  Barcode component
  misc_feature (33)..(34): n is a, c, g, or t
  misc_feature (43)..(44): n is a, c, g, or t
  misc_feature (53)..(54): n is a, c, g, or t
tttttttaagcagtggtatcaacgcagagtacnntgagaaggnnggagacaanntttttttttttttttttttttttttttttt

SEQ ID NO: 2710 - DNA, 84 bp, Artificial
  Barcode component
  misc_feature (33)..(34): n is a, c, g, or t
  misc_feature (43)..(44): n is a, c, g, or t
  misc_feature (53)..(54): n is a, c, g, or t
tttttttaagcagtggtatcaacgcagagtacnntgagaaggnntcaaggacnntttttttttttttttttttttttttttttt

SEQ ID NO: 2711 - DNA, 84 bp, Artificial
  Barcode component
  misc_feature (33)..(34): n is a, c, g, or t
  misc_feature (43)..(44): n is a, c, g, or t
  misc_feature (53)..(54): n is a, c, g, or t
tttttttaagcagtggtatcaacgcagagtacnntgagaaggnnaagagagcnntttttttttttttttttttttttttttttt

SEQ ID NO: 2712 - DNA, 84 bp, Artificial
  Barcode component
  misc_feature (33)..(34): n is a, c, g, or t
  misc_feature (43)..(44): n is a, c, g, or t
  misc_feature (53)..(54): n is a, c, g, or t
tttttttaagcagtggtatcaacgcagagtacnntgagaaggnncgagagatnntttttttttttttttttttttttttttttt

SEQ ID NO: 2713 - DNA, 84 bp, Artificial
  Barcode component
  misc_feature (33)..(34): n is a, c, g, or t
  misc_feature (43)..(44): n is a, c, g, or t
  misc_feature (53)..(54): n is a, c, g, or t
tttttttaagcagtggtatcaacgcagagtacnntgagaaggnnacagatggnntttttttttttttttttttttttttttttt

SEQ ID NO: 2714 - DNA, 84 bp, Artificial
  Barcode component
  misc_feature (33)..(34): n is a, c, g, or t
  misc_feature (43)..(44): n is a, c, g, or t
  misc_feature (53)..(54): n is a, c, g, or t
tttttttaagcagtggtatcaacgcagagtacnntgagaaggnnaggagtcanntttttttttttttttttttttttttttttt

SEQ ID NO: 2715 - DNA, 84 bp, Artificial
  Barcode component
  misc_feature (33)..(34): n is a, c, g, or t
  misc_feature (43)..(44): n is a, c, g, or t
  misc_feature (53)..(54): n is a, c, g, or t
tttttttaagcagtggtatcaacgcagagtacnntgagaaggnncgtgttacnntttttttttttttttttttttttttttttt

SEQ ID NO: 2716 - DNA, 84 bp, Artificial
  Barcode component
  misc_feature (33)..(34): n is a, c, g, or t
  misc_feature (43)..(44): n is a, c, g, or t
  misc_feature (53)..(54): n is a, c, g, or t
tttttttaagcagtggtatcaacgcagagtacnntgagaaggnntagtgtgcnntttttttttttttttttttttttttttttt

SEQ ID NO: 2717 - DNA, 84 bp, Artificial
  Barcode component
  misc_feature (33)..(34): n is a, c, g, or t
  misc_feature (43)..(44): n is a, c, g, or t
  misc_feature (53)..(54): n is a, c, g, or t
tttttttaagcagtggtatcaacgcagagtacnntgagaaggnnctcatgacnntttttttttttttttttttttttttttttt

SEQ ID NO: 2718 - DNA, 84 bp, Artificial
  Barcode component
  misc_feature (33)..(34): n is a, c, g, or t
  misc_feature (43)..(44): n is a, c, g, or t
  misc_feature (53)..(54): n is a, c, g, or t
tttttttaagcagtggtatcaacgcagagtacnntgagaaggnngtatccagnntttttttttttttttttttttttttttttt

SEQ ID NO: 2719 - DNA, 84 bp, Artificial
  Barcode component
  misc_feature (33)..(34): n is a, c, g, or t
  misc_feature (43)..(44): n is a, c, g, or t
  misc_feature (53)..(54): n is a, c, g, or t
tttttttaagcagtggtatcaacgcagagtacnntgagaaggnnacgcctatnntttttttttttttttttttttttttttttt

SEQ ID NO: 2720 - DNA, 84 bp, Artificial
  Barcode component
  misc_feature (33)..(34): n is a, c, g, or t
  misc_feature (43)..(44): n is a, c, g, or t
  misc_feature (53)..(54): n is a, c, g, or t
tttttttaagcagtggtatcaacgcagagtacnntgagaaggnnaacgacctnntttttttttttttttttttttttttttttt

SEQ ID NO: 2721 - DNA, 84 bp, Artificial
  Barcode component
  misc_feature (33)..(34): n is a, c, g, or t
  misc_feature (43)..(44): n is a, c, g, or t
  misc_feature (53)..(54): n is a, c, g, or t
tttttttaagcagtggtatcaacgcagagtacnntgagaaggnnatcaggctnntttttttttttttttttttttttttttttt

SEQ ID NO: 2722 - DNA, 84 bp, Artificial
  Barcode component
  misc_feature (33)..(34): n is a, c, g, or t
  misc_feature (43)..(44): n is a, c, g, or t
  misc_feature (53)..(54): n is a, c, g, or t
tttttttaagcagtggtatcaacgcagagtacnntgagaaggnncaagttcgnntttttttttttttttttttttttttttttt

SEQ ID NO: 2723 - DNA, 84 bp, Artificial
  Barcode component
  misc_feature (33)..(34): n is a, c, g, or t
  misc_feature (43)..(44): n is a, c, g, or t
  misc_feature (53)..(54): n is a, c, g, or t
tttttttaagcagtggtatcaacgcagagtacnntgagaaggnntagccaganntttttttttttttttttttttttttttttt

SEQ ID NO: 2724 - DNA, 84 bp, Artificial
  Barcode component
  misc_feature (33)..(34): n is a, c, g, or t
  misc_feature (43)..(44): n is a, c, g, or t
  misc_feature (53)..(54): n is a, c, g, or t
tttttttaagcagtggtatcaacgcagagtacnntgagaaggnncaatcacgnntttttttttttttttttttttttttttttt

SEQ ID NO: 2725 - DNA, 84 bp, Artificial
  Barcode component
  misc_feature (33)..(34): n is a, c, g, or t
  misc_feature (43)..(44): n is a, c, g, or t
  misc_feature (53)..(54): n is a, c, g, or t
tttttttaagcagtggtatcaacgcagagtacnntgagaaggnngcaacaagnntttttttttttttttttttttttttttttt

SEQ ID NO: 2726 - DNA, 84 bp, Artificial
  Barcode component
  misc_feature (33)..(34): n is a, c, g, or t
  misc_feature (43)..(44): n is a, c, g, or t
  misc_feature (53)..(54): n is a, c, g, or t
tttttttaagcagtggtatcaacgcagagtacnntgagaaggnncacgacaanntttttttttttttttttttttttttttttt

SEQ ID NO: 2727 - DNA, 84 bp, Artificial
  Barcode component
  misc_feature (33)..(34): n is a, c, g, or t
  misc_feature (43)..(44): n is a, c, g, or t
  misc_feature (53)..(54): n is a, c, g, or t
tttttttaagcagtggtatcaacgcagagtacnntgagaaggnntacggaganntttttttttttttttttttttttttttttt

SEQ ID NO: 2728 - DNA, 84 bp, Artificial
  Barcode component
  misc_feature (33)..(34): n is a, c, g, or t
  misc_feature (43)..(44): n is a, c, g, or t
  misc_feature (53)..(54): n is a, c, g, or t
tttttttaagcagtggtatcaacgcagagtacnntgagaaggnncgacaaganntttttttttttttttttttttttttttttt

SEQ ID NO: 2729 - DNA, 84 bp, Artificial
  Barcode component
  misc_feature (33)..(34): n is a, c, g, or t
  misc_feature (43)..(44): n is a, c, g, or t
  misc_feature (53)..(54): n is a, c, g, or t
tttttttaagcagtggtatcaacgcagagtacnntgagaaggnncgaagtganntttttttttttttttttttttttttttttt

SEQ ID NO: 2730 - DNA, 84 bp, Artificial
  Barcode component
  misc_feature (33)..(34): n is a, c, g, or t
  misc_feature (43)..(44): n is a, c, g, or t
  misc_feature (53)..(54): n is a, c, g, or t
tttttttaagcagtggtatcaacgcagagtacnntgagaaggnnagctggtanntttttttttttttttttttttttttttttt

SEQ ID NO: 2731 - DNA, 84 bp, Artificial
  Barcode component
  misc_feature (33)..(34): n is a, c, g, or t
  misc_feature (43)..(44): n is a, c, g, or t
  misc_feature (53)..(54): n is a, c, g, or t
tttttttaagcagtggtatcaacgcagagtacnntgagaaggnnaactaggcnntttttttttttttttttttttttttttttt

SEQ ID NO: 2732 - DNA, 84 bp, Artificial
  Barcode component
  misc_feature (33)..(34): n is a, c, g, or t
  misc_feature (43)..(44): n is a, c, g, or t
  misc_feature (53)..(54): n is a, c, g, or t
tttttttaagcagtggtatcaacgcagagtacnntgagaaggnncagcaagtnntttttttttttttttttttttttttttttt

SEQ ID NO: 2733 - DNA, 84 bp, Artificial
  Barcode component
  misc_feature (33)..(34): n is a, c, g, or t
  misc_feature (43)..(44): n is a, c, g, or t
  misc_feature (53)..(54): n is a, c, g, or t
tttttttaagcagtggtatcaacgcagagtacnntgagaaggnnacgaggtanntttttttttttttttttttttttttttttt

SEQ ID NO: 2734 - DNA, 84 bp, Artificial
  Barcode component
  misc_feature (33)..(34): n is a, c, g, or t
  misc_feature (43)..(44): n is a, c, g, or t
  misc_feature (53)..(54): n is a, c, g, or t
tttttttaagcagtggtatcaacgcagagtacnntgagaaggnncatcttccnntttttttttttttttttttttttttttttt

SEQ ID NO: 2735 - DNA, 84 bp, Artificial
  Barcode component
  misc_feature (33)..(34): n is a, c, g, or t
  misc_feature (43)..(44): n is a, c, g, or t
  misc_feature (53)..(54): n is a, c, g, or t
tttttttaagcagtggtatcaacgcagagtacnntgagaaggnncctgaatcnntttttttttttttttttttttttttttttt

SEQ ID NO: 2736 - DNA, 84 bp, Artificial
  Barcode component
  misc_feature (33)..(34): n is a, c, g, or t
  misc_feature (43)..(44): n is a, c, g, or t
  misc_feature (53)..(54): n is a, c, g, or t
tttttttaagcagtggtatcaacgcagagtacnntgagaaggnntgcagactnntttttttttttttttttttttttttttttt

SEQ ID NO: 2737 - DNA, 84 bp, Artificial
  Barcode component
  misc_feature (33)..(34): n is a, c, g, or t
  misc_feature (43)..(44): n is a, c, g, or t
  misc_feature (53)..(54): n is a, c, g, or t
tttttttaagcagtggtatcaacgcagagtacnntgagaaggnnagatgtggnntttttttttttttttttttttttttttttt

SEQ ID NO: 2738 - DNA, 84 bp, Artificial
  Barcode component
  misc_feature (33)..(34): n is a, c, g, or t
  misc_feature (43)..(44): n is a, c, g, or t
  misc_feature (53)..(54): n is a, c, g, or t
tttttttaagcagtggtatcaacgcagagtacnntgagaaggnnagttcgacnntttttttttttttttttttttttttttttt

SEQ ID NO: 2739 - DNA, 84 bp, Artificial
  Barcode component
  misc_feature (33)..(34): n is a, c, g, or t
  misc_feature (43)..(44): n is a, c, g, or t
  misc_feature (53)..(54): n is a, c, g, or t
tttttttaagcagtggtatcaacgcagagtacnntgagaaggnnacaacctcnntttttttttttttttttttttttttttttt

SEQ ID NO: 2740 - DNA, 84 bp, Artificial
  Barcode component
  misc_feature (33)..(34): n is a, c, g, or t
  misc_feature (43)..(44): n is a, c, g, or t
  misc_feature (53)..(54): n is a, c, g, or t
tttttttaagcagtggtatcaacgcagagtacnntgagaaggnncatggtagnntttttttttttttttttttttttttttttt

SEQ ID NO: 2741 - DNA, 84 bp, Artificial
  Barcode component
  misc_feature (33)..(34): n is a, c, g, or t
  misc_feature (43)..(44): n is a, c, g, or t
  misc_feature (53)..(54): n is a, c, g, or t
tttttttaagcagtggtatcaacgcagagtacnntgagaaggnncgtatctcnntttttttttttttttttttttttttttttt

SEQ ID NO: 2742 - DNA, 84 bp, Artificial
  Barcode component
  misc_feature (33)..(34): n is a, c, g, or t
  misc_feature (43)..(44): n is a, c, g, or t
  misc_feature (53)..(54): n is a, c, g, or t
tttttttaagcagtggtatcaacgcagagtacnntgagaaggnncctagttcnntttttttttttttttttttttttttttttt

SEQ ID NO: 2743 - DNA, 84 bp, Artificial
  Barcode component
  misc_feature (33)..(34): n is a, c, g, or t
  misc_feature (43)..(44): n is a, c, g, or t
  misc_feature (53)..(54): n is a, c, g, or t
tttttttaagcagtggtatcaacgcagagtacnntgagaaggnncaagagtcnntttttttttttttttttttttttttttttt

SEQ ID NO: 2744 - DNA, 84 bp, Artificial
  Barcode component
  misc_feature (33)..(34): n is a, c, g, or t
  misc_feature (43)..(44): n is a, c, g, or t
  misc_feature (53)..(54): n is a, c, g, or t
tttttttaagcagtggtatcaacgcagagtacnngtcgatgtnnaatcggcanntttttttttttttttttttttttttttttt

SEQ ID NO: 2745 - DNA, 84 bp, Artificial
  Barcode component
  misc_feature (33)..(34): n is a, c, g, or t
  misc_feature (43)..(44): n is a, c, g, or t
  misc_feature (53)..(54): n is a, c, g, or t
tttttttaagcagtggtatcaacgcagagtacnngtcgatgtnntacggcatnntttttttttttttttttttttttttttttt

SEQ ID NO: 2746 - DNA, 84 bp, Artificial
  Barcode component
  misc_feature (33)..(34): n is a, c, g, or t
  misc_feature (43)..(44): n is a, c, g, or t
  misc_feature (53)..(54): n is a, c, g, or t
tttttttaagcagtggtatcaacgcagagtacnngtcgatgtnnttggatcgnntttttttttttttttttttttttttttttt

SEQ ID NO: 2747 - DNA, 84 bp, Artificial
  Barcode component
  misc_feature (33)..(34): n is a, c, g, or t
  misc_feature (43)..(44): n is a, c, g, or t
  misc_feature (53)..(54): n is a, c, g, or t
tttttttaagcagtggtatcaacgcagagtacnngtcgatgtnntggaacganntttttttttttttttttttttttttttttt

SEQ ID NO: 2748 - DNA, 84 bp, Artificial
  Barcode component
  misc_feature (33)..(34): n is a, c, g, or t
  misc_feature (43)..(44): n is a, c, g, or t
  misc_feature (53)..(54): n is a, c, g, or t
tttttttaagcagtggtatcaacgcagagtacnngtcgatgtnnggcaatcanntttttttttttttttttttttttttttttt

SEQ ID NO: 2749 - DNA, 84 bp, Artificial
  Barcode component
  misc_feature (33)..(34): n is a, c, g, or t
  misc_feature (43)..(44): n is a, c, g, or t
  misc_feature (53)..(54): n is a, c, g, or t
tttttttaagcagtggtatcaacgcagagtacnngtcgatgtnngaatccganntttttttttttttttttttttttttttttt

SEQ ID NO: 2750 - DNA, 84 bp, Artificial
  Barcode component
  misc_feature (33)..(34): n is a, c, g, or t
  misc_feature (43)..(44): n is a, c, g, or t
  misc_feature (53)..(54): n is a, c, g, or t
tttttttaagcagtggtatcaacgcagagtacnngtcgatgtnnttacggtgnntttttttttttttttttttttttttttttt

SEQ ID NO: 2751 - DNA, 84 bp, Artificial
  Barcode component
  misc_feature (33)..(34): n is a, c, g, or t
  misc_feature (43)..(44): n is a, c, g, or t
  misc_feature (53)..(54): n is a, c, g, or t
tttttttaagcagtggtatcaacgcagagtacnngtcgatgtnncatatcggnntttttttttttttttttttttttttttttt

SEQ ID NO: 2752 - DNA, 84 bp, Artificial
  Barcode component
  misc_feature (33)..(34): n is a, c, g, or t
  misc_feature (43)..(44): n is a, c, g, or t
  misc_feature (53)..(54): n is a, c, g, or t
tttttttaagcagtggtatcaacgcagagtacnngtcgatgtnncttcggtanntttttttttttttttttttttttttttttt

SEQ ID NO: 2753 - DNA, 84 bp, Artificial
  Barcode component
  misc_feature (33)..(34): n is a, c, g, or t
  misc_feature (43)..(44): n is a, c, g, or t
  misc_feature (53)..(54): n is a, c, g, or t
tttttttaagcagtggtatcaacgcagagtacnngtcgatgtnntcctaacgnntttttttttttttttttttttttttttttt

SEQ ID NO: 2754 - DNA, 84 bp, Artificial
  Barcode component
  misc_feature (33)..(34): n is a, c, g, or t
  misc_feature (43)..(44): n is a, c, g, or t
  misc_feature (53)..(54): n is a, c, g, or t
tttttttaagcagtggtatcaacgcagagtacnngtcgatgtnngtaagccanntttttttttttttttttttttttttttttt

SEQ ID NO: 2755 - DNA, 84 bp, Artificial
  Barcode component
  misc_feature (33)..(34): n is a, c, g, or t
  misc_feature (43)..(44): n is a, c, g, or t
  misc_feature (53)..(54): n is a, c, g, or t
tttttttaagcagtggtatcaacgcagagtacnngtcgatgtnntaaggtggnntttttttttttttttttttttttttttttt

SEQ ID NO: 2756 - DNA, 84 bp, Artificial
  Barcode component
  misc_feature (33)..(34): n is a, c, g, or t
  misc_feature (43)..(44): n is a, c, g, or t
  misc_feature (53)..(54): n is a, c, g, or t
tttttttaagcagtggtatcaacgcagagtacnngtcgatgtnnggtaagctnntttttttttttttttttttttttttttttt

SEQ ID NO: 2757 - DNA, 84 bp, Artificial
  Barcode component
  misc_feature (33)..(34): n is a, c, g, or t
  misc_feature (43)..(44): n is a, c, g, or t
  misc_feature (53)..(54): n is a, c, g, or t
tttttttaagcagtggtatcaacgcagagtacnngtcgatgtnntgtgtcganntttttttttttttttttttttttttttttt

SEQ ID NO: 2758 - DNA, 84 bp, Artificial
  Barcode component
  misc_feature (33)..(34): n is a, c, g, or t
  misc_feature (43)..(44): n is a, c, g, or t
  misc_feature (53)..(54): n is a, c, g, or t
tttttttaagcagtggtatcaacgcagagtacnngtcgatgtnngagcatganntttttttttttttttttttttttttttttt

SEQ ID NO: 2759 - DNA, 84 bp, Artificial
  Barcode component
  misc_feature (33)..(34): n is a, c, g, or t
  misc_feature (43)..(44): n is a, c, g, or t
  misc_feature (53)..(54): n is a, c, g, or t
tttttttaagcagtggtatcaacgcagagtacnngtcgatgtnntcgaagtcnntttttttttttttttttttttttttttttt

SEQ ID NO: 2760 - DNA, 84 bp, Artificial
  Barcode component
  misc_feature (33)..(34): n is a, c, g, or t
  misc_feature (43)..(44): n is a, c, g, or t
  misc_feature (53)..(54): n is a, c, g, or t
tttttttaagcagtggtatcaacgcagagtacnngtcgatgtnnggtgaacanntttttttttttttttttttttttttttttt

SEQ ID NO: 2761 - DNA, 84 bp, Artificial
  Barcode component
  misc_feature (33)..(34): n is a, c, g, or t
  misc_feature (43)..(44): n is a, c, g, or t
  misc_feature (53)..(54): n is a, c, g, or t
tttttttaagcagtggtatcaacgcagagtacnngtcgatgtnnacatgcacnntttttttttttttttttttttttttttttt

SEQ ID NO: 2762 - DNA, 84 bp, Artificial
  Barcode component
  misc_feature (33)..(34): n is a, c, g, or t
  misc_feature (43)..(44): n is a, c, g, or t
  misc_feature (53)..(54): n is a, c, g, or t
tttttttaagcagtggtatcaacgcagagtacnngtcgatgtnnccaacagtnntttttttttttttttttttttttttttttt

SEQ ID NO: 2763 - DNA, 84 bp, Artificial
  Barcode component
  misc_feature (33)..(34): n is a, c, g, or t
  misc_feature (43)..(44): n is a, c, g, or t
  misc_feature (53)..(54): n is a, c, g, or t
tttttttaagcagtggtatcaacgcagagtacnngtcgatgtnnagaacagcnntttttttttttttttttttttttttttttt

SEQ ID NO: 2764 - DNA, 84 bp, Artificial
  Barcode component
  misc_feature (33)..(34): n is a, c, g, or t
  misc_feature (43)..(44): n is a, c, g, or t
  misc_feature (53)..(54): n is a, c, g, or t
tttttttaagcagtggtatcaacgcagagtacnngtcgatgtnngaacacgtnntttttttttttttttttttttttttttttt

SEQ ID NO: 2765 - DNA, 84 bp, Artificial
  Barcode component
  misc_feature (33)..(34): n is a, c, g, or t
  misc_feature (43)..(44): n is a, c, g, or t
  misc_feature (53)..(54): n is a, c, g, or t
tttttttaagcagtggtatcaacgcagagtacnngtcgatgtnnggtcttcanntttttttttttttttttttttttttttttt

SEQ ID NO: 2766 - DNA, 84 bp, Artificial
  Barcode component
  misc_feature (33)..(34): n is a, c, g, or t
  misc_feature (43)..(44): n is a, c, g, or t
  misc_feature (53)..(54): n is a, c, g, or t
tttttttaagcagtggtatcaacgcagagtacnngtcgatgtnnaggttcagnntttttttttttttttttttttttttttttt

SEQ ID NO: 2767 - DNA, 84 bp, Artificial
  Barcode component
  misc_feature (33)..(34): n is a, c, g, or t
  misc_feature (43)..(44): n is a, c, g, or t
  misc_feature (53)..(54): n is a, c, g, or t
tttttttaagcagtggtatcaacgcagagtacnngtcgatgtnnctagagcanntttttttttttttttttttttttttttttt

SEQ ID NO: 2768 - DNA, 84 bp, Artificial
  Barcode component
  misc_feature (33)..(34): n is a, c, g, or t
  misc_feature (43)..(44): n is a, c, g, or t
  misc_feature (53)..(54): n is a, c, g, or t
tttttttaagcagtggtatcaacgcagagtacnngtcgatgtnncttctagcnntttttttttttttttttttttttttttttt

SEQ ID NO: 2769 - DNA, 84 bp, Artificial
  Barcode component
  misc_feature (33)..(34): n is a, c, g, or t
  misc_feature (43)..(44): n is a, c, g, or t
  misc_feature (53)..(54): n is a, c, g, or t
tttttttaagcagtggtatcaacgcagagtacnngtcgatgtnngagtaacgnntttttttttttttttttttttttttttttt

SEQ ID NO: 2770 - DNA, 84 bp, Artificial
  Barcode component
  misc_feature (33)..(34): n is a, c, g, or t
  misc_feature (43)..(44): n is a, c, g, or t
  misc_feature (53)..(54): n is a, c, g, or t
tttttttaagcagtggtatcaacgcagagtacnngtcgatgtnnctaagaggnntttttttttttttttttttttttttttttt

SEQ ID NO: 2771 - DNA, 84 bp, Artificial
  Barcode component
  misc_feature (33)..(34): n is a, c, g, or t
  misc_feature (43)..(44): n is a, c, g, or t
  misc_feature (53)..(54): n is a, c, g, or t
tttttttaagcagtggtatcaacgcagagtacnngtcgatgtnnacgtgtagnntttttttttttttttttttttttttttttt

SEQ ID NO: 2772 - DNA, 84 bp, Artificial
  Barcode component
  misc_feature (33)..(34): n is a, c, g, or t
  misc_feature (43)..(44): n is a, c, g, or t
  misc_feature (53)..(54): n is a, c, g, or t
tttttttaagcagtggtatcaacgcagagtacnngtcgatgtnnactacaggnntttttttttttttttttttttttttttttt

SEQ ID NO: 2773 - DNA, 84 bp, Artificial
  Barcode component
  misc_feature (33)..(34): n is a, c, g, or t
  misc_feature (43)..(44): n is a, c, g, or t
  misc_feature (53)..(54): n is a, c, g, or t
tttttttaagcagtggtatcaacgcagagtacnngtcgatgtnntacaggtcnntttttttttttttttttttttttttttttt

SEQ ID NO: 2774 - DNA, 84 bp, Artificial
  Barcode component
  misc_feature (33)..(34): n is a, c, g, or t
  misc_feature (43)..(44): n is a, c, g, or t
  misc_feature (53)..(54): n is a, c, g, or t
tttttttaagcagtggtatcaacgcagagtacnngtcgatgtnnctcacatgnntttttttttttttttttttttttttttttt

SEQ ID NO: 2775 - DNA, 84 bp, Artificial
  Barcode component
  misc_feature (33)..(34): n is a, c, g, or t
  misc_feature (43)..(44): n is a, c, g, or t
  misc_feature (53)..(54): n is a, c, g, or t
tttttttaagcagtggtatcaacgcagagtacnngtcgatgtnnactaggagnntttttttttttttttttttttttttttttt

SEQ ID NO: 2776 - DNA, 84 bp, Artificial
  Barcode component
  misc_feature (33)..(34): n is a, c, g, or t
  misc_feature (43)..(44): n is a, c, g, or t
  misc_feature (53)..(54): n is a, c, g, or t
tttttttaagcagtggtatcaacgcagagtacnngtcgatgtnnccatagganntttttttttttttttttttttttttttttt

SEQ ID NO: 2777 - DNA, 84 bp, Artificial
  Barcode component
  misc_feature (33)..(34): n is a, c, g, or t
  misc_feature (43)..(44): n is a, c, g, or t
  misc_feature (53)..(54): n is a, c, g, or t
tttttttaagcagtggtatcaacgcagagtacnngtcgatgtnnggagaatcnntttttttttttttttttttttttttttttt

SEQ ID NO: 2778 - DNA, 84 bp, Artificial
  Barcode component
  misc_feature (33)..(34): n is a, c, g, or t
  misc_feature (43)..(44): n is a, c, g, or t
  misc_feature (53)..(54): n is a, c, g, or t
tttttttaagcagtggtatcaacgcagagtacnngtcgatgtnngccaagaanntttttttttttttttttttttttttttttt

SEQ ID NO: 2779 - DNA, 84 bp, Artificial
  Barcode component
  misc_feature (33)..(34): n is a, c, g, or t
  misc_feature (43)..(44): n is a, c, g, or t
  misc_feature (53)..(54): n is a, c, g, or t
tttttttaagcagtggtatcaacgcagagtacnngtcgatgtnnaaggcaagnntttttttttttttttttttttttttttttt

SEQ ID NO: 2780 - DNA, 84 bp, Artificial
  Barcode component
  misc_feature (33)..(34): n is a, c, g, or t
  misc_feature (43)..(44): n is a, c, g, or t
  misc_feature (53)..(54): n is a, c, g, or t
tttttttaagcagtggtatcaacgcagagtacnngtcgatgtnnaatgtcgcnntttttttttttttttttttttttttttttt

SEQ ID NO: 2781 - DNA, 84 bp, Artificial
  Barcode component
  misc_feature (33)..(34): n is a, c, g, or t
  misc_feature (43)..(44): n is a, c, g, or t
  misc_feature (53)..(54): n is a, c, g, or t
tttttttaagcagtggtatcaacgcagagtacnngtcgatgtnnatggaaccnntttttttttttttttttttttttttttttt

SEQ ID NO: 2782 - DNA, 84 bp, Artificial
  Barcode component
  misc_feature (33)..(34): n is a, c, g, or t
  misc_feature (43)..(44): n is a, c, g, or t
  misc_feature (53)..(54): n is a, c, g, or t
tttttttaagcagtggtatcaacgcagagtacnngtcgatgtnnagaggcatnntttttttttttttttttttttttttttttt

SEQ ID NO: 2783 - DNA, 84 bp, Artificial
  Barcode component
  misc_feature (33)..(34): n is a, c, g, or t
  misc_feature (43)..(44): n is a, c, g, or t
  misc_feature (53)..(54): n is a, c, g, or t
tttttttaagcagtggtatcaacgcagagtacnngtcgatgtnntgcatagcnntttttttttttttttttttttttttttttt

SEQ ID NO: 2784 - DNA, 84 bp, Artificial
  Barcode component
  misc_feature (33)..(34): n is a, c, g, or t
  misc_feature (43)..(44): n is a, c, g, or t
  misc_feature (53)..(54): n is a, c, g, or t
tttttttaagcagtggtatcaacgcagagtacnngtcgatgtnnctaacgganntttttttttttttttttttttttttttttt

SEQ ID NO: 2785 - DNA, 84 bp, Artificial
  Barcode component
  misc_feature (33)..(34): n is a, c, g, or t
  misc_feature (43)..(44): n is a, c, g, or t
  misc_feature (53)..(54): n is a, c, g, or t
tttttttaagcagtggtatcaacgcagagtacnngtcgatgtnntatcgaggnntttttttttttttttttttttttttttttt

SEQ ID NO: 2786 - DNA, 84 bp, Artificial
  Barcode component
  misc_feature (33)..(34): n is a, c, g, or t
  misc_feature (43)..(44): n is a, c, g, or t
  misc_feature (53)..(54): n is a, c, g, or t
tttttttaagcagtggtatcaacgcagagtacnngtcgatgtnncatagcctnntttttttttttttttttttttttttttttt

SEQ ID NO: 2787 - DNA, 84 bp, Artificial
  Barcode component
  misc_feature (33)..(34): n is a, c, g, or t
  misc_feature (43)..(44): n is a, c, g, or t
  misc_feature (53)..(54): n is a, c, g, or t
tttttttaagcagtggtatcaacgcagagtacnngtcgatgtnnatcgagacnntttttttttttttttttttttttttttttt

SEQ ID NO: 2788 - DNA, 84 bp, Artificial
  Barcode component
  misc_feature (33)..(34): n is a, c, g, or t
  misc_feature (43)..(44): n is a, c, g, or t
  misc_feature (53)..(54): n is a, c, g, or t
tttttttaagcagtggtatcaacgcagagtacnngtcgatgtnnggaagagtnntttttttttttttttttttttttttttttt

SEQ ID NO: 2789 - DNA, 84 bp, Artificial
  Barcode component
  misc_feature (33)..(34): n is a, c, g, or t
  misc_feature (43)..(44): n is a, c, g, or t
  misc_feature (53)..(54): n is a, c, g, or t
tttttttaagcagtggtatcaacgcagagtacnngtcgatgtnnccaagtagnntttttttttttttttttttttttttttttt

SEQ ID NO: 2790 - DNA, 84 bp, Artificial
  Barcode component
  misc_feature (33)..(34): n is a, c, g, or t
  misc_feature (43)..(44): n is a, c, g, or t
  misc_feature (53)..(54): n is a, c, g, or t
tttttttaagcagtggtatcaacgcagagtacnngtcgatgtnnctgaacagnntttttttttttttttttttttttttttttt

SEQ ID NO: 2791 - DNA, 84 bp, Artificial
  Barcode component
  misc_feature (33)..(34): n is a, c, g, or t
  misc_feature (43)..(44): n is a, c, g, or t
  misc_feature (53)..(54): n is a, c, g, or t
tttttttaagcagtggtatcaacgcagagtacnngtcgatgtnngtaggttcnntttttttttttttttttttttttttttttt

SEQ ID NO: 2792 - DNA, 84 bp, Artificial
  Barcode component
  misc_feature (33)..(34): n is a, c, g, or t
  misc_feature (43)..(44): n is a, c, g, or t
  misc_feature (53)..(54): n is a, c, g, or t
tttttttaagcagtggtatcaacgcagagtacnngtcgatgtnngtatggacnntttttttttttttttttttttttttttttt

SEQ ID NO: 2793 - DNA, 84 bp, Artificial
  Barcode component
  misc_feature (33)..(34): n is a, c, g, or t
  misc_feature (43)..(44): n is a, c, g, or t
  misc_feature (53)..(54): n is a, c, g, or t
tttttttaagcagtggtatcaacgcagagtacnngtcgatgtnntcgcaacanntttttttttttttttttttttttttttttt

SEQ ID NO: 2794 - DNA, 84 bp, Artificial
  Barcode component
  misc_feature (33)..(34): n is a, c, g, or t
  misc_feature (43)..(44): n is a, c, g, or t
  misc_feature (53)..(54): n is a, c, g, or t
tttttttaagcagtggtatcaacgcagagtacnngtcgatgtnnccgctaatnntttttttttttttttttttttttttttttt

SEQ ID NO: 2795 - DNA, 84 bp, Artificial
  Barcode component
  misc_feature (33)..(34): n is a, c, g, or t
  misc_feature (43)..(44): n is a, c, g, or t
  misc_feature (53)..(54): n is a, c, g, or t
tttttttaagcagtggtatcaacgcagagtacnngtcgatgtnngattcgcanntttttttttttttttttttttttttttttt

SEQ ID NO: 2796 - DNA, 84 bp, Artificial
  Barcode component
  misc_feature (33)..(34): n is a, c, g, or t
  misc_feature (43)..(44): n is a, c, g, or t
  misc_feature (53)..(54): n is a, c, g, or t
tttttttaagcagtggtatcaacgcagagtacnngtcgatgtnncgatggaanntttttttttttttttttttttttttttttt

SEQ ID NO: 2797 - DNA, 84 bp, Artificial
  Barcode component
  misc_feature (33)..(34): n is a, c, g, or t
  misc_feature (43)..(44): n is a, c, g, or t
  misc_feature (53)..(54): n is a, c, g, or t
tttttttaagcagtggtatcaacgcagagtacnngtcgatgtnnagcaagganntttttttttttttttttttttttttttttt

SEQ ID NO: 2798 - DNA, 84 bp, Artificial
  Barcode component
  misc_feature (33)..(34): n is a, c, g, or t
  misc_feature (43)..(44): n is a, c, g, or t
  misc_feature (53)..(54): n is a, c, g, or t
tttttttaagcagtggtatcaacgcagagtacnngtcgatgtnncgtagcaanntttttttttttttttttttttttttttttt

SEQ ID NO: 2799 - DNA, 84 bp, Artificial
  Barcode component
  misc_feature (33)..(34): n is a, c, g, or t
  misc_feature (43)..(44): n is a, c, g, or t
  misc_feature (53)..(54): n is a, c, g, or t
tttttttaagcagtggtatcaacgcagagtacnngtcgatgtnntggcagtanntttttttttttttttttttttttttttttt

SEQ ID NO: 2800 - DNA, 84 bp, Artificial
  Barcode component
  misc_feature (33)..(34): n is a, c, g, or t
  misc_feature (43)..(44): n is a, c, g, or t
  misc_feature (53)..(54): n is a, c, g, or t
tttttttaagcagtggtatcaacgcagagtacnngtcgatgtnncggtagttnntttttttttttttttttttttttttttttt

SEQ ID NO: 2801 - DNA, 84 bp, Artificial
  Barcode component
  misc_feature (33)..(34): n is a, c, g, or t
  misc_feature (43)..(44): n is a, c, g, or t
  misc_feature (53)..(54): n is a, c, g, or t
tttttttaagcagtggtatcaacgcagagtacnngtcgatgtnntgacttcgnntttttttttttttttttttttttttttttt

SEQ ID NO: 2802 - DNA, 84 bp, Artificial
  Barcode component
  misc_feature (33)..(34): n is a, c, g, or t
  misc_feature (43)..(44): n is a, c, g, or t
  misc_feature (53)..(54): n is a, c, g, or t
tttttttaagcagtggtatcaacgcagagtacnngtcgatgtnngagtgcaanntttttttttttttttttttttttttttttt

SEQ ID NO: 2803 - DNA, 84 bp, Artificial
  Barcode component
  misc_feature (33)..(34): n is a, c, g, or t
  misc_feature (43)..(44): n is a, c, g, or t
  misc_feature (53)..(54): n is a, c, g, or t
tttttttaagcagtggtatcaacgcagagtacnngtcgatgtnnacggtaacnntttttttttttttttttttttttttttttt

SEQ ID NO: 2804 - DNA, 84 bp, Artificial
  Barcode component
  misc_feature (33)..(34): n is a, c, g, or t
  misc_feature (43)..(44): n is a, c, g, or t
  misc_feature (53)..(54): n is a, c, g, or t
tttttttaagcagtggtatcaacgcagagtacnngtcgatgtnnaagtggtgnntttttttttttttttttttttttttttttt

SEQ ID NO: 2805 - DNA, 84 bp, Artificial
  Barcode component
  misc_feature (33)..(34): n is a, c, g, or t
  misc_feature (43)..(44): n is a, c, g, or t
  misc_feature (53)..(54): n is a, c, g, or t
tttttttaagcagtggtatcaacgcagagtacnngtcgatgtnnggagacaanntttttttttttttttttttttttttttttt

SEQ ID NO: 2806 - DNA, 84 bp, Artificial
  Barcode component
  misc_feature (33)..(34): n is a, c, g, or t
  misc_feature (43)..(44): n is a, c, g, or t
  misc_feature (53)..(54): n is a, c, g, or t
tttttttaagcagtggtatcaacgcagagtacnngtcgatgtnntcaaggacnntttttttttttttttttttttttttttttt

SEQ ID NO: 2807 - DNA, 84 bp, Artificial
  Barcode component
  misc_feature (33)..(34): n is a, c, g, or t
  misc_feature (43)..(44): n is a, c, g, or t
  misc_feature (53)..(54): n is a, c, g, or t
tttttttaagcagtggtatcaacgcagagtacnngtcgatgtnnaagagagcnntttttttttttttttttttttttttttttt

SEQ ID NO: 2808 - DNA, 84 bp, Artificial
  Barcode component
  misc_feature (33)..(34): n is a, c, g, or t
  misc_feature (43)..(44): n is a, c, g, or t
  misc_feature (53)..(54): n is a, c, g, or t
tttttttaagcagtggtatcaacgcagagtacnngtcgatgtnncgagagatnntttttttttttttttttttttttttttttt

SEQ ID NO: 2809 - DNA, 84 bp, Artificial
  Barcode component
  misc_feature (33)..(34): n is a, c, g, or t
  misc_feature (43)..(44): n is a, c, g, or t
  misc_feature (53)..(54): n is a, c, g, or t
tttttttaagcagtggtatcaacgcagagtacnngtcgatgtnnacagatggnntttttttttttttttttttttttttttttt

SEQ ID NO: 2810 - DNA, 84 bp, Artificial
  Barcode component
  misc_feature (33)..(34): n is a, c, g, or t
  misc_feature (43)..(44): n is a, c, g, or t
  misc_feature (53)..(54): n is a, c, g, or t
tttttttaagcagtggtatcaacgcagagtacnngtcgatgtnnaggagtcanntttttttttttttttttttttttttttttt

SEQ ID NO: 2811 - DNA, 84 bp, Artificial
  Barcode component
  misc_feature (33)..(34): n is a, c, g, or t
  misc_feature (43)..(44): n is a, c, g, or t
  misc_feature (53)..(54): n is a, c, g, or t
tttttttaagcagtggtatcaacgcagagtacnngtcgatgtnncgtgttacnntttttttttttttttttttttttttttttt

SEQ ID NO: 2812 - DNA, 84 bp, Artificial
  Barcode component
  misc_feature (33)..(34): n is a, c, g, or t
  misc_feature (43)..(44): n is a, c, g, or t
  misc_feature (53)..(54): n is a, c, g, or t
tttttttaagcagtggtatcaacgcagagtacnngtcgatgtnntagtgtgcnntttttttttttttttttttttttttttttt

SEQ ID NO: 2813 - DNA, 84 bp, Artificial
  Barcode component
  misc_feature (33)..(34): n is a, c, g, or t
  misc_feature (43)..(44): n is a, c, g, or t
  misc_feature (53)..(54): n is a, c, g, or t
tttttttaagcagtggtatcaacgcagagtacnngtcgatgtnnctcatgacnntttttttttttttttttttttttttttttt

SEQ ID NO: 2814 - DNA, 84 bp, Artificial
  Barcode component
  misc_feature (33)..(34): n is a, c, g, or t
  misc_feature (43)..(44): n is a, c, g, or t
  misc_feature (53)..(54): n is a, c, g, or t
tttttttaagcagtggtatcaacgcagagtacnngtcgatgtnngtatccagnntttttttttttttttttttttttttttttt

SEQ ID NO: 2815 - DNA, 84 bp, Artificial
  Barcode component
  misc_feature (33)..(34): n is a, c, g, or t
  misc_feature (43)..(44): n is a, c, g, or t
  misc_feature (53)..(54): n is a, c, g, or t
tttttttaagcagtggtatcaacgcagagtacnngtcgatgtnnacgcctatnntttttttttttttttttttttttttttttt

SEQ ID NO: 2816 - DNA, 84 bp, Artificial
  Barcode component
  misc_feature (33)..(34): n is a, c, g, or t
  misc_feature (43)..(44): n is a, c, g, or t
  misc_feature (53)..(54): n is a, c, g, or t
tttttttaagcagtggtatcaacgcagagtacnngtcgatgtnnaacgacctnntttttttttttttttttttttttttttttt

SEQ ID NO: 2817 - DNA, 84 bp, Artificial
  Barcode component
  misc_feature (33)..(34): n is a, c, g, or t
  misc_feature (43)..(44): n is a, c, g, or t
  misc_feature (53)..(54): n is a, c, g, or t
tttttttaagcagtggtatcaacgcagagtacnngtcgatgtnnatcaggctnntttttttttttttttttttttttttttttt

SEQ ID NO: 2818 - DNA, 84 bp, Artificial
  Barcode component
  misc_feature (33)..(34): n is a, c, g, or t
  misc_feature (43)..(44): n is a, c, g, or t
  misc_feature (53)..(54): n is a, c, g, or t
tttttttaagcagtggtatcaacgcagagtacnngtcgatgtnncaagttcgnntttttttttttttttttttttttttttttt

SEQ ID NO: 2819 - DNA, 84 bp, Artificial
  Barcode component
  misc_feature (33)..(34): n is a, c, g, or t
  misc_feature (43)..(44): n is a, c, g, or t
  misc_feature (53)..(54): n is a, c, g, or t
tttttttaagcagtggtatcaacgcagagtacnngtcgatgtnntagccaganntttttttttttttttttttttttttttttt

SEQ ID NO: 2820 - DNA, 84 bp, Artificial
  Barcode component
  misc_feature (33)..(34): n is a, c, g, or t
  misc_feature (43)..(44): n is a, c, g, or t
  misc_feature (53)..(54): n is a, c, g, or t
tttttttaagcagtggtatcaacgcagagtacnngtcgatgtnncaatcacgnntttttttttttttttttttttttttttttt

SEQ ID NO: 2821 - DNA, 84 bp, Artificial
  Barcode component
  misc_feature (33)..(34): n is a, c, g, or t
  misc_feature (43)..(44): n is a, c, g, or t
  misc_feature (53)..(54): n is a, c, g, or t
tttttttaagcagtggtatcaacgcagagtacnngtcgatgtnngcaacaagnntttttttttttttttttttttttttttttt

SEQ ID NO: 2822 - DNA, 84 bp, Artificial
  Barcode component
  misc_feature (33)..(34): n is a, c, g, or t
  misc_feature (43)..(44): n is a, c, g, or t
  misc_feature (53)..(54): n is a, c, g, or t
tttttttaagcagtggtatcaacgcagagtacnngtcgatgtnncacgacaanntttttttttttttttttttttttttttttt

SEQ ID NO: 2823 - DNA, 84 bp, Artificial
  Barcode component
  misc_feature (33)..(34): n is a, c, g, or t
  misc_feature (43)..(44): n is a, c, g, or t
  misc_feature (53)..(54): n is a, c, g, or t
tttttttaagcagtggtatcaacgcagagtacnngtcgatgtnntacggaganntttttttttttttttttttttttttttttt

SEQ ID NO: 2824 - DNA, 84 bp, Artificial
  Barcode component
  misc_feature (33)..(34): n is a, c, g, or t
  misc_feature (43)..(44): n is a, c, g, or t
  misc_feature (53)..(54): n is a, c, g, or t
tttttttaagcagtggtatcaacgcagagtacnngtcgatgtnncgacaaganntttttttttttttttttttttttttttttt

SEQ ID NO: 2825 - DNA, 84 bp, Artificial
  Barcode component
  misc_feature (33)..(34): n is a, c, g, or t
  misc_feature (43)..(44): n is a, c, g, or t
  misc_feature (53)..(54): n is a, c, g, or t
tttttttaagcagtggtatcaacgcagagtacnngtcgatgtnncgaagtganntttttttttttttttttttttttttttttt

SEQ ID NO: 2826 - DNA, 84 bp, Artificial
  Barcode component
  misc_feature (33)..(34): n is a, c, g, or t
  misc_feature (43)..(44): n is a, c, g, or t
  misc_feature (53)..(54): n is a, c, g, or t
tttttttaagcagtggtatcaacgcagagtacnngtcgatgtnnagctggtanntttttttttttttttttttttttttttttt

SEQ ID NO: 2827 - DNA, 84 bp, Artificial
  Barcode component
  misc_feature (33)..(34): n is a, c, g, or t
  misc_feature (43)..(44): n is a, c, g, or t
  misc_feature (53)..(54): n is a, c, g, or t
tttttttaagcagtggtatcaacgcagagtacnngtcgatgtnnaactaggcnntttttttttttttttttttttttttttttt

SEQ ID NO: 2828 - DNA, 84 bp, Artificial
  Barcode component
  misc_feature (33)..(34): n is a, c, g, or t
  misc_feature (43)..(44): n is a, c, g, or t
  misc_feature (53)..(54): n is a, c, g, or t
tttttttaagcagtggtatcaacgcagagtacnngtcgatgtnncagcaagtnntttttttttttttttttttttttttttttt

SEQ ID NO: 2829 - DNA, 84 bp, Artificial
  Barcode component
  misc_feature (33)..(34): n is a, c, g, or t
  misc_feature (43)..(44): n is a, c, g, or t
  misc_feature (53)..(54): n is a, c, g, or t
tttttttaagcagtggtatcaacgcagagtacnngtcgatgtnnacgaggtanntttttttttttttttttttttttttttttt

SEQ ID NO: 2830 - DNA, 84 bp, Artificial
  Barcode component
  misc_feature (33)..(34): n is a, c, g, or t
  misc_feature (43)..(44): n is a, c, g, or t
  misc_feature (53)..(54): n is a, c, g, or t
tttttttaagcagtggtatcaacgcagagtacnngtcgatgtnncatcttccnntttttttttttttttttttttttttttttt

SEQ ID NO: 2831 - DNA, 84 bp, Artificial
  Barcode component
  misc_feature (33)..(34): n is a, c, g, or t
  misc_feature (43)..(44): n is a, c, g, or t
  misc_feature (53)..(54): n is a, c, g, or t
tttttttaagcagtggtatcaacgcagagtacnngtcgatgtnncctgaatcnntttttttttttttttttttttttttttttt

SEQ ID NO: 2832 - DNA, 84 bp, Artificial
  Barcode component
  misc_feature (33)..(34): n is a, c, g, or t
  misc_feature (43)..(44): n is a, c, g, or t
  misc_feature (53)..(54): n is a, c, g, or t
tttttttaagcagtggtatcaacgcagagtacnngtcgatgtnntgcagactnntttttttttttttttttttttttttttttt

SEQ ID NO: 2833 - DNA, 84 bp, Artificial
  Barcode component
  misc_feature (33)..(34): n is a, c, g, or t
  misc_feature (43)..(44): n is a, c, g, or t
  misc_feature (53)..(54): n is a, c, g, or t
tttttttaagcagtggtatcaacgcagagtacnngtcgatgtnnagatgtggnntttttttttttttttttttttttttttttt

SEQ ID NO: 2834 - DNA, 84 bp, Artificial
  Barcode component
  misc_feature (33)..(34): n is a, c, g, or t
  misc_feature (43)..(44): n is a, c, g, or t
  misc_feature (53)..(54): n is a, c, g, or t
tttttttaagcagtggtatcaacgcagagtacnngtcgatgtnnagttcgacnntttttttttttttttttttttttttttttt

SEQ ID NO: 2835 - DNA, 84 bp, Artificial
  Barcode component
  misc_feature (33)..(34): n is a, c, g, or t
  misc_feature (43)..(44): n is a, c, g, or t
  misc_feature (53)..(54): n is a, c, g, or t
tttttttaagcagtggtatcaacgcagagtacnngtcgatgtnnacaacctcnntttttttttttttttttttttttttttttt

SEQ ID NO: 2836 - DNA, 84 bp, Artificial
  Barcode component
  misc_feature (33)..(34): n is a, c, g, or t
  misc_feature (43)..(44): n is a, c, g, or t
  misc_feature (53)..(54): n is a, c, g, or t
tttttttaagcagtggtatcaacgcagagtacnngtcgatgtnncatggtagnntttttttttttttttttttttttttttttt

SEQ ID NO: 2837 - DNA, 84 bp, Artificial
  Barcode component
  misc_feature (33)..(34): n is a, c, g, or t
  misc_feature (43)..(44): n is a, c, g, or t
  misc_feature (53)..(54): n is a, c, g, or t
tttttttaagcagtggtatcaacgcagagtacnngtcgatgtnncgtatctcnntttttttttttttttttttttttttttttt

SEQ ID NO: 2838 - DNA, 84 bp, Artificial
  Barcode component
  misc_feature (33)..(34): n is a, c, g, or t
  misc_feature (43)..(44): n is a, c, g, or t
  misc_feature (53)..(54): n is a, c, g, or t
tttttttaagcagtggtatcaacgcagagtacnngtcgatgtnncctagttcnntttttttttttttttttttttttttttttt

SEQ ID NO: 2839 - DNA, 84 bp, Artificial
  Barcode component
  misc_feature (33)..(34): n is a, c, g, or t
  misc_feature (43)..(44): n is a, c, g, or t
  misc_feature (53)..(54): n is a, c, g, or t
tttttttaagcagtggtatcaacgcagagtacnngtcgatgtnncaagagtcnntttttttttttttttttttttttttttttt

SEQ ID NO: 2840 - DNA, 84 bp, Artificial
  Barcode component
  misc_feature (33)..(34): n is a, c, g, or t
  misc_feature (43)..(44): n is a, c, g, or t
  misc_feature (53)..(54): n is a, c, g, or t
tttttttaagcagtggtatcaacgcagagtacnngaaggactnnaatcggcanntttttttttttttttttttttttttttttt

SEQ ID NO: 2841 - DNA, 84 bp, Artificial
  Barcode component
  misc_feature (33)..(34): n is a, c, g, or t
  misc_feature (43)..(44): n is a, c, g, or t
  misc_feature (53)..(54): n is a, c, g, or t
tttttttaagcagtggtatcaacgcagagtacnngaaggactnntacggcatnntttttttttttttttttttttttttttttt

SEQ ID NO: 2842 - DNA, 84 bp, Artificial
  Barcode component
  misc_feature (33)..(34): n is a, c, g, or t
  misc_feature (43)..(44): n is a, c, g, or t
  misc_feature (53)..(54): n is a, c, g, or t
tttttttaagcagtggtatcaacgcagagtacnngaaggactnnttggatcgnntttttttttttttttttttttttttttttt

SEQ ID NO: 2843 - DNA, 84 bp, Artificial
  Barcode component
  misc_feature (33)..(34): n is a, c, g, or t
  misc_feature (43)..(44): n is a, c, g, or t
  misc_feature (53)..(54): n is a, c, g, or t
tttttttaagcagtggtatcaacgcagagtacnngaaggactnntggaacganntttttttttttttttttttttttttttttt

SEQ ID NO: 2844 - DNA, 84 bp, Artificial
  Barcode component
  misc_feature (33)..(34): n is a, c, g, or t
  misc_feature (43)..(44): n is a, c, g, or t
  misc_feature (53)..(54): n is a, c, g, or t
tttttttaagcagtggtatcaacgcagagtacnngaaggactnnggcaatcanntttttttttttttttttttttttttttttt

SEQ ID NO: 2845 - DNA, 84 bp, Artificial
  Barcode component
  misc_feature (33)..(34): n is a, c, g, or t
  misc_feature (43)..(44): n is a, c, g, or t
  misc_feature (53)..(54): n is a, c, g, or t
tttttttaagcagtggtatcaacgcagagtacnngaaggactnngaatccganntttttttttttttttttttttttttttttt

SEQ ID NO: 2846 - DNA, 84 bp, Artificial
  Barcode component
  misc_feature (33)..(34): n is a, c, g, or t
  misc_feature (43)..(44): n is a, c, g, or t
  misc_feature (53)..(54): n is a, c, g, or t
tttttttaagcagtggtatcaacgcagagtacnngaaggactnnttacggtgnntttttttttttttttttttttttttttttt

SEQ ID NO: 2847 - DNA, 84 bp, Artificial
  Barcode component
  misc_feature (33)..(34): n is a, c, g, or t
  misc_feature (43)..(44): n is a, c, g, or t
  misc_feature (53)..(54): n is a, c, g, or t
tttttttaagcagtggtatcaacgcagagtacnngaaggactnncatatcggnntttttttttttttttttttttttttttttt

SEQ ID NO: 2848 - DNA, 84 bp, Artificial
  Barcode component
  misc_feature (33)..(34): n is a, c, g, or t
  misc_feature (43)..(44): n is a, c, g, or t
  misc_feature (53)..(54): n is a, c, g, or t
tttttttaagcagtggtatcaacgcagagtacnngaaggactnncttcggtanntttttttttttttttttttttttttttttt

SEQ ID NO: 2849 - DNA, 84 bp, Artificial
  Barcode component
  misc_feature (33)..(34): n is a, c, g, or t
  misc_feature (43)..(44): n is a, c, g, or t
  misc_feature (53)..(54): n is a, c, g, or t
tttttttaagcagtggtatcaacgcagagtacnngaaggactnntcctaacgnntttttttttttttttttttttttttttttt

SEQ ID NO: 2850 - DNA, 84 bp, Artificial
  Barcode component
  misc_feature (33)..(34): n is a, c, g, or t
  misc_feature (43)..(44): n is a, c, g, or t
  misc_feature (53)..(54): n is a, c, g, or t
tttttttaagcagtggtatcaacgcagagtacnngaaggactnngtaagccanntttttttttttttttttttttttttttttt

SEQ ID NO: 2851 - DNA, 84 bp, Artificial
  Barcode component
  misc_feature (33)..(34): n is a, c, g, or t
  misc_feature (43)..(44): n is a, c, g, or t
  misc_feature (53)..(54): n is a, c, g, or t
tttttttaagcagtggtatcaacgcagagtacnngaaggactnntaaggtggnntttttttttttttttttttttttttttttt

SEQ ID NO: 2852 - DNA, 84 bp, Artificial
  Barcode component
  misc_feature (33)..(34): n is a, c, g, or t
  misc_feature (43)..(44): n is a, c, g, or t
  misc_feature (53)..(54): n is a, c, g, or t
tttttttaagcagtggtatcaacgcagagtacnngaaggactnnggtaagctnntttttttttttttttttttttttttttttt

SEQ ID NO: 2853 - DNA, 84 bp, Artificial
  Barcode component
  misc_feature (33)..(34): n is a, c, g, or t
  misc_feature (43)..(44): n is a, c, g, or t
  misc_feature (53)..(54): n is a, c, g, or t
tttttttaagcagtggtatcaacgcagagtacnngaaggactnntgtgtcganntttttttttttttttttttttttttttttt

SEQ ID NO: 2854 - DNA, 84 bp, Artificial
  Barcode component
  misc_feature (33)..(34): n is a, c, g, or t
  misc_feature (43)..(44): n is a, c, g, or t
  misc_feature (53)..(54): n is a, c, g, or t
tttttttaagcagtggtatcaacgcagagtacnngaaggactnngagcatganntttttttttttttttttttttttttttttt

SEQ ID NO: 2855 - DNA, 84 bp, Artificial
  Barcode component
  misc_feature (33)..(34): n is a, c, g, or t
  misc_feature (43)..(44): n is a, c, g, or t
  misc_feature (53)..(54): n is a, c, g, or t
tttttttaagcagtggtatcaacgcagagtacnngaaggactnntcgaagtcnntttttttttttttttttttttttttttttt

SEQ ID NO: 2856 - DNA, 84 bp, Artificial
  Barcode component
  misc_feature (33)..(34): n is a, c, g, or t
  misc_feature (43)..(44): n is a, c, g, or t
  misc_feature (53)..(54): n is a, c, g, or t
tttttttaagcagtggtatcaacgcagagtacnngaaggactnnggtgaacanntttttttttttttttttttttttttttttt

SEQ ID NO: 2857 - DNA, 84 bp, Artificial
  Barcode component
  misc_feature (33)..(34): n is a, c, g, or t
  misc_feature (43)..(44): n is a, c, g, or t
  misc_feature (53)..(54): n is a, c, g, or t
tttttttaagcagtggtatcaacgcagagtacnngaaggactnnacatgcacnntttttttttttttttttttttttttttttt

SEQ ID NO: 2858 - DNA, 84 bp, Artificial
  Barcode component
  misc_feature (33)..(34): n is a, c, g, or t
  misc_feature (43)..(44): n is a, c, g, or t
  misc_feature (53)..(54): n is a, c, g, or t
tttttttaagcagtggtatcaacgcagagtacnngaaggactnnccaacagtnntttttttttttttttttttttttttttttt

SEQ ID NO: 2859 - DNA, 84 bp, Artificial
  Barcode component
  misc_feature (33)..(34): n is a, c, g, or t
  misc_feature (43)..(44): n is a, c, g, or t
  misc_feature (53)..(54): n is a, c, g, or t
tttttttaagcagtggtatcaacgcagagtacnngaaggactnnagaacagcnntttttttttttttttttttttttttttttt

SEQ ID NO: 2860 - DNA, 84 bp, Artificial
  Barcode component
  misc_feature (33)..(34): n is a, c, g, or t
  misc_feature (43)..(44): n is a, c, g, or t
  misc_feature (53)..(54): n is a, c, g, or t
tttttttaagcagtggtatcaacgcagagtacnngaaggactnngaacacgtnntttttttttttttttttttttttttttttt

SEQ ID NO: 2861 - DNA, 84 bp, Artificial
  Barcode component
  misc_feature (33)..(34): n is a, c, g, or t
  misc_feature (43)..(44): n is a, c, g, or t
  misc_feature (53)..(54): n is a, c, g, or t
tttttttaagcagtggtatcaacgcagagtacnngaaggactnnggtcttcanntttttttttttttttttttttttttttttt

SEQ ID NO: 2862 - DNA, 84 bp, Artificial
  Barcode component
  misc_feature (33)..(34): n is a, c, g, or t
  misc_feature (43)..(44): n is a, c, g, or t
  misc_feature (53)..(54): n is a, c, g, or t
tttttttaagcagtggtatcaacgcagagtacnngaaggactnnaggttcagnntttttttttttttttttttttttttttttt

SEQ ID NO: 2863 - DNA, 84 bp, Artificial
  Barcode component
  misc_feature (33)..(34): n is a, c, g, or t
  misc_feature (43)..(44): n is a, c, g, or t
  misc_feature (53)..(54): n is a, c, g, or t
tttttttaagcagtggtatcaacgcagagtacnngaaggactnnctagagcanntttttttttttttttttttttttttttttt

SEQ ID NO: 2864 - DNA, 84 bp, Artificial
  Barcode component
  misc_feature (33)..(34): n is a, c, g, or t
  misc_feature (43)..(44): n is a, c, g, or t
  misc_feature (53)..(54): n is a, c, g, or t
tttttttaagcagtggtatcaacgcagagtacnngaaggactnncttctagcnntttttttttttttttttttttttttttttt

SEQ ID NO: 2865 - DNA, 84 bp, Artificial
  Barcode component
  misc_feature (33)..(34): n is a, c, g, or t
  misc_feature (43)..(44): n is a, c, g, or t
  misc_feature (53)..(54): n is a, c, g, or t
tttttttaagcagtggtatcaacgcagagtacnngaaggactnngagtaacgnntttttttttttttttttttttttttttttt

SEQ ID NO: 2866 - DNA, 84 bp, Artificial
  Barcode component
  misc_feature (33)..(34): n is a, c, g, or t
  misc_feature (43)..(44): n is a, c, g, or t
  misc_feature (53)..(54): n is a, c, g, or t
tttttttaagcagtggtatcaacgcagagtacnngaaggactnnctaagaggnntttttttttttttttttttttttttttttt

SEQ ID NO: 2867 - DNA, 84 bp, Artificial
  Barcode component
  misc_feature (33)..(34): n is a, c, g, or t
  misc_feature (43)..(44): n is a, c, g, or t
  misc_feature (53)..(54): n is a, c, g, or t
tttttttaagcagtggtatcaacgcagagtacnngaaggactnnacgtgtagnntttttttttttttttttttttttttttttt

SEQ ID NO: 2868 - DNA, 84 bp, Artificial
  Barcode component
  misc_feature (33)..(34): n is a, c, g, or t
  misc_feature (43)..(44): n is a, c, g, or t
  misc_feature (53)..(54): n is a, c, g, or t
tttttttaagcagtggtatcaacgcagagtacnngaaggactnnactacaggnntttttttttttttttttttttttttttttt

SEQ ID NO: 2869 - DNA, 84 bp, Artificial
  Barcode component
  misc_feature (33)..(34): n is a, c, g, or t
  misc_feature (43)..(44): n is a, c, g, or t
  misc_feature (53)..(54): n is a, c, g, or t
tttttttaagcagtggtatcaacgcagagtacnngaaggactnntacaggtcnntttttttttttttttttttttttttttttt

SEQ ID NO: 2870 - DNA, 84 bp, Artificial
  Barcode component
  misc_feature (33)..(34): n is a, c, g, or t
  misc_feature (43)..(44): n is a, c, g, or t
  misc_feature (53)..(54): n is a, c, g, or t
tttttttaagcagtggtatcaacgcagagtacnngaaggactnnctcacatgnntttttttttttttttttttttttttttttt

SEQ ID NO: 2871 - DNA, 84 bp, Artificial
  Barcode component
  misc_feature (33)..(34): n is a, c, g, or t
  misc_feature (43)..(44): n is a, c, g, or t
  misc_feature (53)..(54): n is a, c, g, or t
tttttttaagcagtggtatcaacgcagagtacnngaaggactnnactaggagnntttttttttttttttttttttttttttttt

SEQ ID NO: 2872 - DNA, 84 bp, Artificial
  Barcode component
  misc_feature (33)..(34): n is a, c, g, or t
  misc_feature (43)..(44): n is a, c, g, or t
  misc_feature (53)..(54): n is a, c, g, or t
tttttttaagcagtggtatcaacgcagagtacnngaaggactnnccatagganntttttttttttttttttttttttttttttt

SEQ ID NO: 2873 - DNA, 84 bp, Artificial
  Barcode component
  misc_feature (33)..(34): n is a, c, g, or t
  misc_feature (43)..(44): n is a, c, g, or t
  misc_feature (53)..(54): n is a, c, g, or t
tttttttaagcagtggtatcaacgcagagtacnngaaggactnnggagaatcnntttttttttttttttttttttttttttttt

SEQ ID NO: 2874 - DNA, 84 bp, Artificial
  Barcode component
  misc_feature (33)..(34): n is a, c, g, or t
  misc_feature (43)..(44): n is a, c, g, or t
  misc_feature (53)..(54): n is a, c, g, or t
tttttttaagcagtggtatcaacgcagagtacnngaaggactnngccaagaanntttttttttttttttttttttttttttttt

SEQ ID NO: 2875 - DNA, 84 bp, Artificial
  Barcode component
  misc_feature (33)..(34): n is a, c, g, or t
  misc_feature (43)..(44): n is a, c, g, or t
  misc_feature (53)..(54): n is a, c, g, or t
tttttttaagcagtggtatcaacgcagagtacnngaaggactnnaaggcaagnntttttttttttttttttttttttttttttt

SEQ ID NO: 2876 - DNA, 84 bp, Artificial
  Barcode component
  misc_feature (33)..(34): n is a, c, g, or t
  misc_feature (43)..(44): n is a, c, g, or t
  misc_feature (53)..(54): n is a, c, g, or t
tttttttaagcagtggtatcaacgcagagtacnngaaggactnnaatgtcgcnntttttttttttttttttttttttttttttt

SEQ ID NO: 2877 - DNA, 84 bp, Artificial
  Barcode component
  misc_feature (33)..(34): n is a, c, g, or t
  misc_feature (43)..(44): n is a, c, g, or t
  misc_feature (53)..(54): n is a, c, g, or t
tttttttaagcagtggtatcaacgcagagtacnngaaggactnnatggaaccnntttttttttttttttttttttttttttttt

SEQ ID NO: 2878 - DNA, 84 bp, Artificial
  Barcode component
  misc_feature (33)..(34): n is a, c, g, or t
  misc_feature (43)..(44): n is a, c, g, or t
  misc_feature (53)..(54): n is a, c, g, or t
tttttttaagcagtggtatcaacgcagagtacnngaaggactnnagaggcatnntttttttttttttttttttttttttttttt

SEQ ID NO: 2879 - DNA, 84 bp, Artificial
  Barcode component
  misc_feature (33)..(34): n is a, c, g, or t
  misc_feature (43)..(44): n is a, c, g, or t
  misc_feature (53)..(54): n is a, c, g, or t
tttttttaagcagtggtatcaacgcagagtacnngaaggactnntgcatagcnntttttttttttttttttttttttttttttt

SEQ ID NO: 2880 - DNA, 84 bp, Artificial
  Barcode component
  misc_feature (33)..(34): n is a, c, g, or t
  misc_feature (43)..(44): n is a, c, g, or t
  misc_feature (53)..(54): n is a, c, g, or t
tttttttaagcagtggtatcaacgcagagtacnngaaggactnnctaacgganntttttttttttttttttttttttttttttt

SEQ ID NO: 2881 - DNA, 84 bp, Artificial
  Barcode component
  misc_feature (33)..(34): n is a, c, g, or t
  misc_feature (43)..(44): n is a, c, g, or t
  misc_feature (53)..(54): n is a, c, g, or t
tttttttaagcagtggtatcaacgcagagtacnngaaggactnntatcgaggnntttttttttttttttttttttttttttttt

SEQ ID NO: 2882 - DNA, 84 bp, Artificial
  Barcode component
  misc_feature (33)..(34): n is a, c, g, or t
  misc_feature (43)..(44): n is a, c, g, or t
  misc_feature (53)..(54): n is a, c, g, or t
tttttttaagcagtggtatcaacgcagagtacnngaaggactnncatagcctnntttttttttttttttttttttttttttttt

SEQ ID NO: 2883 - DNA, 84 bp, Artificial
  Barcode component
  misc_feature (33)..(34): n is a, c, g, or t
  misc_feature (43)..(44): n is a, c, g, or t
  misc_feature (53)..(54): n is a, c, g, or t
tttttttaagcagtggtatcaacgcagagtacnngaaggactnnatcgagacnntttttttttttttttttttttttttttttt

SEQ ID NO: 2884 - DNA, 84 bp, Artificial
  Barcode component
  misc_feature (33)..(34): n is a, c, g, or t
  misc_feature (43)..(44): n is a, c, g, or t
  misc_feature (53)..(54): n is a, c, g, or t
tttttttaagcagtggtatcaacgcagagtacnngaaggactnnggaagagtnntttttttttttttttttttttttttttttt

SEQ ID NO: 2885 - DNA, 84 bp, Artificial
  Barcode component
  misc_feature (33)..(34): n is a, c, g, or t
  misc_feature (43)..(44): n is a, c, g, or t
  misc_feature (53)..(54): n is a, c, g, or t
tttttttaagcagtggtatcaacgcagagtacnngaaggactnnccaagtagnntttttttttttttttttttttttttttttt

SEQ ID NO: 2886 - DNA, 84 bp, Artificial
  Barcode component
  misc_feature (33)..(34): n is a, c, g, or t
  misc_feature (43)..(44): n is a, c, g, or t
  misc_feature (53)..(54): n is a, c, g, or t
tttttttaagcagtggtatcaacgcagagtacnngaaggactnnctgaacagnntttttttttttttttttttttttttttttt

SEQ ID NO: 2887 - DNA, 84 bp, Artificial
  Barcode component
  misc_feature (33)..(34): n is a, c, g, or t
  misc_feature (43)..(44): n is a, c, g, or t
  misc_feature (53)..(54): n is a, c, g, or t
tttttttaagcagtggtatcaacgcagagtacnngaaggactnngtaggttcnntttttttttttttttttttttttttttttt

SEQ ID NO: 2888 - DNA, 84 bp, Artificial
  Barcode component
  misc_feature (33)..(34): n is a, c, g, or t
  misc_feature (43)..(44): n is a, c, g, or t
  misc_feature (53)..(54): n is a, c, g, or t
tttttttaagcagtggtatcaacgcagagtacnngaaggactnngtatggacnntttttttttttttttttttttttttttttt

SEQ ID NO: 2889 - DNA, 84 bp, Artificial
  Barcode component
  misc_feature (33)..(34): n is a, c, g, or t
  misc_feature (43)..(44): n is a, c, g, or t
  misc_feature (53)..(54): n is a, c, g, or t
tttttttaagcagtggtatcaacgcagagtacnngaaggactnntcgcaacanntttttttttttttttttttttttttttttt

SEQ ID NO: 2890 - DNA, 84 bp, Artificial
  Barcode component
  misc_feature (33)..(34): n is a, c, g, or t
  misc_feature (43)..(44): n is a, c, g, or t
  misc_feature (53)..(54): n is a, c, g, or t
tttttttaagcagtggtatcaacgcagagtacnngaaggactnnccgctaatnntttttttttttttttttttttttttttttt

SEQ ID NO: 2891 - DNA, 84 bp, Artificial
  Barcode component
  misc_feature (33)..(34): n is a, c, g, or t
  misc_feature (43)..(44): n is a, c, g, or t
  misc_feature (53)..(54): n is a, c, g, or t
tttttttaagcagtggtatcaacgcagagtacnngaaggactnngattcgcanntttttttttttttttttttttttttttttt

SEQ ID NO: 2892 - DNA, 84 bp, Artificial
  Barcode component
  misc_feature (33)..(34): n is a, c, g, or t
  misc_feature (43)..(44): n is a, c, g, or t
  misc_feature (53)..(54): n is a, c, g, or t
tttttttaagcagtggtatcaacgcagagtacnngaaggactnncgatggaanntttttttttttttttttttttttttttttt

SEQ ID NO: 2893 - DNA, 84 bp, Artificial
  Barcode component
  misc_feature (33)..(34): n is a, c, g, or t
  misc_feature (43)..(44): n is a, c, g, or t
  misc_feature (53)..(54): n is a, c, g, or t
tttttttaagcagtggtatcaacgcagagtacnngaaggactnnagcaagganntttttttttttttttttttttttttttttt

SEQ ID NO: 2894 - DNA, 84 bp, Artificial
  Barcode component
  misc_feature (33)..(34): n is a, c, g, or t
  misc_feature (43)..(44): n is a, c, g, or t
  misc_feature (53)..(54): n is a, c, g, or t
tttttttaagcagtggtatcaacgcagagtacnngaaggactnncgtagcaanntttttttttttttttttttttttttttttt

SEQ ID NO: 2895 - DNA, 84 bp, Artificial
  Barcode component
  misc_feature (33)..(34): n is a, c, g, or t
  misc_feature (43)..(44): n is a, c, g, or t
  misc_feature (53)..(54): n is a, c, g, or t
tttttttaagcagtggtatcaacgcagagtacnngaaggactnntggcagtanntttttttttttttttttttttttttttttt

SEQ ID NO: 2896 - DNA, 84 bp, Artificial
  Barcode component
  misc_feature (33)..(34): n is a, c, g, or t
  misc_feature (43)..(44): n is a, c, g, or t
  misc_feature (53)..(54): n is a, c, g, or t
tttttttaagcagtggtatcaacgcagagtacnngaaggactnncggtagttnntttttttttttttttttttttttttttttt

SEQ ID NO: 2897 - DNA, 84 bp, Artificial
  Barcode component
  misc_feature (33)..(34): n is a, c, g, or t
  misc_feature (43)..(44): n is a, c, g, or t
  misc_feature (53)..(54): n is a, c, g, or t
tttttttaagcagtggtatcaacgcagagtacnngaaggactnntgacttcgnntttttttttttttttttttttttttttttt

SEQ ID NO: 2898 - DNA, 84 bp, Artificial
  Barcode component
  misc_feature (33)..(34): n is a, c, g, or t
  misc_feature (43)..(44): n is a, c, g, or t
  misc_feature (53)..(54): n is a, c, g, or t
tttttttaagcagtggtatcaacgcagagtacnngaaggactnngagtgcaanntttttttttttttttttttttttttttttt

SEQ ID NO: 2899 - DNA, 84 bp, Artificial
  Barcode component
  misc_feature (33)..(34): n is a, c, g, or t
  misc_feature (43)..(44): n is a, c, g, or t
  misc_feature (53)..(54): n is a, c, g, or t
tttttttaagcagtggtatcaacgcagagtacnngaaggactnnacggtaacnntttttttttttttttttttttttttttttt

SEQ ID NO: 2900 - DNA, 84 bp, Artificial
  Barcode component
  misc_feature (33)..(34): n is a, c, g, or t
  misc_feature (43)..(44): n is a, c, g, or t
  misc_feature (53)..(54): n is a, c, g, or t
tttttttaagcagtggtatcaacgcagagtacnngaaggactnnaagtggtgnntttttttttttttttttttttttttttttt

SEQ ID NO: 2901 - DNA, 84 bp, Artificial
  Barcode component
  misc_feature (33)..(34): n is a, c, g, or t
  misc_feature (43)..(44): n is a, c, g, or t
  misc_feature (53)..(54): n is a, c, g, or t
tttttttaagcagtggtatcaacgcagagtacnngaaggactnnggagacaanntttttttttttttttttttttttttttttt

SEQ ID NO: 2902 - DNA, 84 bp, Artificial
  Barcode component
  misc_feature (33)..(34): n is a, c, g, or t
  misc_feature (43)..(44): n is a, c, g, or t
  misc_feature (53)..(54): n is a, c, g, or t
tttttttaagcagtggtatcaacgcagagtacnngaaggactnntcaaggacnntttttttttttttttttttttttttttttt

SEQ ID NO: 2903 - DNA, 84 bp, Artificial
  Barcode component
  misc_feature (33)..(34): n is a, c, g, or t
  misc_feature (43)..(44): n is a, c, g, or t
  misc_feature (53)..(54): n is a, c, g, or t
tttttttaagcagtggtatcaacgcagagtacnngaaggactnnaagagagcnntttttttttttttttttttttttttttttt

SEQ ID NO: 2904 - DNA, 84 bp, Artificial
  Barcode component
  misc_feature (33)..(34): n is a, c, g, or t
  misc_feature (43)..(44): n is a, c, g, or t
  misc_feature (53)..(54): n is a, c, g, or t
tttttttaagcagtggtatcaacgcagagtacnngaaggactnncgagagatnntttttttttttttttttttttttttttttt

SEQ ID NO: 2905 - DNA, 84 bp, Artificial
  Barcode component
  misc_feature (33)..(34): n is a, c, g, or t
  misc_feature (43)..(44): n is a, c, g, or t
  misc_feature (53)..(54): n is a, c, g, or t
tttttttaagcagtggtatcaacgcagagtacnngaaggactnnacagatggnntttttttttttttttttttttttttttttt

SEQ ID NO: 2906 - DNA, 84 bp, Artificial
  Barcode component
  misc_feature (33)..(34): n is a, c, g, or t
  misc_feature (43)..(44): n is a, c, g, or t
  misc_feature (53)..(54): n is a, c, g, or t
tttttttaagcagtggtatcaacgcagagtacnngaaggactnnaggagtcanntttttttttttttttttttttttttttttt

SEQ ID NO: 2907 - DNA, 84 bp, Artificial
  Barcode component
  misc_feature (33)..(34): n is a, c, g, or t
  misc_feature (43)..(44): n is a, c, g, or t
  misc_feature (53)..(54): n is a, c, g, or t
tttttttaagcagtggtatcaacgcagagtacnngaaggactnncgtgttacnntttttttttttttttttttttttttttttt

SEQ ID NO: 2908 - DNA, 84 bp, Artificial
  Barcode component
  misc_feature (33)..(34): n is a, c, g, or t
  misc_feature (43)..(44): n is a, c, g, or t
  misc_feature (53)..(54): n is a, c, g, or t
tttttttaagcagtggtatcaacgcagagtacnngaaggactnntagtgtgcnntttttttttttttttttttttttttttttt

SEQ ID NO: 2909 - DNA, 84 bp, Artificial
  Barcode component
  misc_feature (33)..(34): n is a, c, g, or t
  misc_feature (43)..(44): n is a, c, g, or t
  misc_feature (53)..(54): n is a, c, g, or t
tttttttaagcagtggtatcaacgcagagtacnngaaggactnnctcatgacnntttttttttttttttttttttttttttttt

SEQ ID NO: 2910 - DNA, 84 bp, Artificial
  Barcode component
  misc_feature (33)..(34): n is a, c, g, or t
  misc_feature (43)..(44): n is a, c, g, or t
  misc_feature (53)..(54): n is a, c, g, or t
tttttttaagcagtggtatcaacgcagagtacnngaaggactnngtatccagnntttttttttttttttttttttttttttttt

SEQ ID NO: 2911 - DNA, 84 bp, Artificial
  Barcode component
  misc_feature (33)..(34): n is a, c, g, or t
  misc_feature (43)..(44): n is a, c, g, or t
  misc_feature (53)..(54): n is a, c, g, or t
tttttttaagcagtggtatcaacgcagagtacnngaaggactnnacgcctatnntttttttttttttttttttttttttttttt

SEQ ID NO: 2912 - DNA, 84 bp, Artificial
  Barcode component
  misc_feature (33)..(34): n is a, c, g, or t
  misc_feature (43)..(44): n is a, c, g, or t
  misc_feature (53)..(54): n is a, c, g, or t
tttttttaagcagtggtatcaacgcagagtacnngaaggactnnaacgacctnntttttttttttttttttttttttttttttt

SEQ ID NO: 2913 - DNA, 84 bp, Artificial
  Barcode component
  misc_feature (33)..(34): n is a, c, g, or t
  misc_feature (43)..(44): n is a, c, g, or t
  misc_feature (53)..(54): n is a, c, g, or t
tttttttaagcagtggtatcaacgcagagtacnngaaggactnnatcaggctnntttttttttttttttttttttttttttttt

SEQ ID NO: 2914 - DNA, 84 bp, Artificial
  Barcode component
  misc_feature (33)..(34): n is a, c, g, or t
  misc_feature (43)..(44): n is a, c, g, or t
  misc_feature (53)..(54): n is a, c, g, or t
tttttttaagcagtggtatcaacgcagagtacnngaaggactnncaagttcgnntttttttttttttttttttttttttttttt

SEQ ID NO: 2915 - DNA, 84 bp, Artificial
  Barcode component
  misc_feature (33)..(34): n is a, c, g, or t
  misc_feature (43)..(44): n is a, c, g, or t
  misc_feature (53)..(54): n is a, c, g, or t
tttttttaagcagtggtatcaacgcagagtacnngaaggactnntagccaganntttttttttttttttttttttttttttttt

SEQ ID NO: 2916 - DNA, 84 bp, Artificial
  Barcode component
  misc_feature (33)..(34): n is a, c, g, or t
  misc_feature (43)..(44): n is a, c, g, or t
  misc_feature (53)..(54): n is a, c, g, or t
tttttttaagcagtggtatcaacgcagagtacnngaaggactnncaatcacgnntttttttttttttttttttttttttttttt

SEQ ID NO: 2917 - DNA, 84 bp, Artificial
  Barcode component
  misc_feature (33)..(34): n is a, c, g, or t
  misc_feature (43)..(44): n is a, c, g, or t
  misc_feature (53)..(54): n is a, c, g, or t
tttttttaagcagtggtatcaacgcagagtacnngaaggactnngcaacaagnntttttttttttttttttttttttttttttt

SEQ ID NO: 2918 - DNA, 84 bp, Artificial
  Barcode component
  misc_feature (33)..(34): n is a, c, g, or t
  misc_feature (43)..(44): n is a, c, g, or t
  misc_feature (53)..(54): n is a, c, g, or t
tttttttaagcagtggtatcaacgcagagtacnngaaggactnncacgacaanntttttttttttttttttttttttttttttt

SEQ ID NO: 2919 - DNA, 84 bp, Artificial
  Barcode component
  misc_feature (33)..(34): n is a, c, g, or t
  misc_feature (43)..(44): n is a, c, g, or t
  misc_feature (53)..(54): n is a, c, g, or t
tttttttaagcagtggtatcaacgcagagtacnngaaggactnntacggaganntttttttttttttttttttttttttttttt

SEQ ID NO: 2920 - DNA, 84 bp, Artificial
  Barcode component
  misc_feature (33)..(34): n is a, c, g, or t
  misc_feature (43)..(44): n is a, c, g, or t
  misc_feature (53)..(54): n is a, c, g, or t
tttttttaagcagtggtatcaacgcagagtacnngaaggactnncgacaaganntttttttttttttttttttttttttttttt

SEQ ID NO: 2921 - DNA, 84 bp, Artificial
  Barcode component
  misc_feature (33)..(34): n is a, c, g, or t
  misc_feature (43)..(44): n is a, c, g, or t
  misc_feature (53)..(54): n is a, c, g, or t
tttttttaagcagtggtatcaacgcagagtacnngaaggactnncgaagtganntttttttttttttttttttttttttttttt

SEQ ID NO: 2922 - DNA, 84 bp, Artificial
  Barcode component
  misc_feature (33)..(34): n is a, c, g, or t
  misc_feature (43)..(44): n is a, c, g, or t
  misc_feature (53)..(54): n is a, c, g, or t
tttttttaagcagtggtatcaacgcagagtacnngaaggactnnagctggtanntttttttttttttttttttttttttttttt

SEQ ID NO: 2923 - DNA, 84 bp, Artificial
  Barcode component
  misc_feature (33)..(34): n is a, c, g, or t
  misc_feature (43)..(44): n is a, c, g, or t
  misc_feature (53)..(54): n is a, c, g, or t
tttttttaagcagtggtatcaacgcagagtacnngaaggactnnaactaggcnntttttttttttttttttttttttttttttt

SEQ ID NO: 2924 - DNA, 84 bp, Artificial
  Barcode component
  misc_feature (33)..(34): n is a, c, g, or t
  misc_feature (43)..(44): n is a, c, g, or t
  misc_feature (53)..(54): n is a, c, g, or t
tttttttaagcagtggtatcaacgcagagtacnngaaggactnncagcaagtnntttttttttttttttttttttttttttttt

SEQ ID NO: 2925 - DNA, 84 bp, Artificial
  Barcode component
  misc_feature (33)..(34): n is a, c, g, or t
  misc_feature (43)..(44): n is a, c, g, or t
  misc_feature (53)..(54): n is a, c, g, or t
tttttttaagcagtggtatcaacgcagagtacnngaaggactnnacgaggtanntttttttttttttttttttttttttttttt

SEQ ID NO: 2926 - DNA, 84 bp, Artificial
  Barcode component
  misc_feature (33)..(34): n is a, c, g, or t
  misc_feature (43)..(44): n is a, c, g, or t
  misc_feature (53)..(54): n is a, c, g, or t
tttttttaagcagtggtatcaacgcagagtacnngaaggactnncatcttccnntttttttttttttttttttttttttttttt

SEQ ID NO: 2927 - DNA, 84 bp, Artificial
  Barcode component
  misc_feature (33)..(34): n is a, c, g, or t
  misc_feature (43)..(44): n is a, c, g, or t
  misc_feature (53)..(54): n is a, c, g, or t
tttttttaagcagtggtatcaacgcagagtacnngaaggactnncctgaatcnntttttttttttttttttttttttttttttt

SEQ ID NO: 2928 - DNA, 84 bp, Artificial
  Barcode component
  misc_feature (33)..(34): n is a, c, g, or t
  misc_feature (43)..(44): n is a, c, g, or t
  misc_feature (53)..(54): n is a, c, g, or t
tttttttaagcagtggtatcaacgcagagtacnngaaggactnntgcagactnntttttttttttttttttttttttttttttt

SEQ ID NO: 2929 - DNA, 84 bp, Artificial
  Barcode component
  misc_feature (33)..(34): n is a, c, g, or t
  misc_feature (43)..(44): n is a, c, g, or t
  misc_feature (53)..(54): n is a, c, g, or t
tttttttaagcagtggtatcaacgcagagtacnngaaggactnnagatgtggnntttttttttttttttttttttttttttttt

SEQ ID NO: 2930 - DNA, 84 bp, Artificial
  Barcode component
  misc_feature (33)..(34): n is a, c, g, or t
  misc_feature (43)..(44): n is a, c, g, or t
  misc_feature (53)..(54): n is a, c, g, or t
tttttttaagcagtggtatcaacgcagagtacnngaaggactnnagttcgacnntttttttttttttttttttttttttttttt

SEQ ID NO: 2931 - DNA, 84 bp, Artificial
  Barcode component
  misc_feature (33)..(34): n is a, c, g, or t
  misc_feature (43)..(44): n is a, c, g, or t
  misc_feature (53)..(54): n is a, c, g, or t
tttttttaagcagtggtatcaacgcagagtacnngaaggactnnacaacctcnntttttttttttttttttttttttttttttt

SEQ ID NO: 2932 - DNA, 84 bp, Artificial
  Barcode component
  misc_feature (33)..(34): n is a, c, g, or t
  misc_feature (43)..(44): n is a, c, g, or t
  misc_feature (53)..(54): n is a, c, g, or t
tttttttaagcagtggtatcaacgcagagtacnngaaggactnncatggtagnntttttttttttttttttttttttttttttt

SEQ ID NO: 2933 - DNA, 84 bp, Artificial
  Barcode component
  misc_feature (33)..(34): n is a, c, g, or t
  misc_feature (43)..(44): n is a, c, g, or t
  misc_feature (53)..(54): n is a, c, g, or t
tttttttaagcagtggtatcaacgcagagtacnngaaggactnncgtatctcnntttttttttttttttttttttttttttttt

SEQ ID NO: 2934 - DNA, 84 bp, Artificial
  Barcode component
  misc_feature (33)..(34): n is a, c, g, or t
  misc_feature (43)..(44): n is a, c, g, or t
  misc_feature (53)..(54): n is a, c, g, or t
tttttttaagcagtggtatcaacgcagagtacnngaaggactnncctagttcnntttttttttttttttttttttttttttttt

SEQ ID NO: 2935 - DNA, 84 bp, Artificial
  Barcode component
  misc_feature (33)..(34): n is a, c, g, or t
  misc_feature (43)..(44): n is a, c, g, or t
  misc_feature (53)..(54): n is a, c, g, or t
tttttttaagcagtggtatcaacgcagagtacnngaaggactnncaagagtcnntttttttttttttttttttttttttttttt

SEQ ID NO: 2936 - DNA, 84 bp, Artificial
  Barcode component
  misc_feature (33)..(34): n is a, c, g, or t
  misc_feature (43)..(44): n is a, c, g, or t
  misc_feature (53)..(54): n is a, c, g, or t
tttttttaagcagtggtatcaacgcagagtacnngtagacctnnaatcggcanntttttttttttttttttttttttttttttt

SEQ ID NO: 2937 - DNA, 84 bp, Artificial
  Barcode component
  misc_feature (33)..(34): n is a, c, g, or t
  misc_feature (43)..(44): n is a, c, g, or t
  misc_feature (53)..(54): n is a, c, g, or t
tttttttaagcagtggtatcaacgcagagtacnngtagacctnntacggcatnntttttttttttttttttttttttttttttt

SEQ ID NO: 2938 - DNA, 84 bp, Artificial
  Barcode component
  misc_feature (33)..(34): n is a, c, g, or t
  misc_feature (43)..(44): n is a, c, g, or t
  misc_feature (53)..(54): n is a, c, g, or t
tttttttaagcagtggtatcaacgcagagtacnngtagacctnnttggatcgnntttttttttttttttttttttttttttttt

SEQ ID NO: 2939 - DNA, 84 bp, Artificial
  Barcode component
  misc_feature (33)..(34): n is a, c, g, or t
  misc_feature (43)..(44): n is a, c, g, or t
  misc_feature (53)..(54): n is a, c, g, or t
tttttttaagcagtggtatcaacgcagagtacnngtagacctnntggaacganntttttttttttttttttttttttttttttt

SEQ ID NO: 2940 - DNA, 84 bp, Artificial
  Barcode component
  misc_feature (33)..(34): n is a, c, g, or t
  misc_feature (43)..(44): n is a, c, g, or t
  misc_feature (53)..(54): n is a, c, g, or t
tttttttaagcagtggtatcaacgcagagtacnngtagacctnnggcaatcanntttttttttttttttttttttttttttttt

SEQ ID NO: 2941 - DNA, 84 bp, Artificial
  Barcode component
  misc_feature (33)..(34): n is a, c, g, or t
  misc_feature (43)..(44): n is a, c, g, or t
  misc_feature (53)..(54): n is a, c, g, or t
tttttttaagcagtggtatcaacgcagagtacnngtagacctnngaatccganntttttttttttttttttttttttttttttt

SEQ ID NO: 2942 - DNA, 84 bp, Artificial
  Barcode component
  misc_feature (33)..(34): n is a, c, g, or t
  misc_feature (43)..(44): n is a, c, g, or t
  misc_feature (53)..(54): n is a, c, g, or t
tttttttaagcagtggtatcaacgcagagtacnngtagacctnnttacggtgnntttttttttttttttttttttttttttttt

SEQ ID NO: 2943 - DNA, 84 bp, Artificial
  Barcode component
  misc_feature (33)..(34): n is a, c, g, or t
  misc_feature (43)..(44): n is a, c, g, or t
  misc_feature (53)..(54): n is a, c, g, or t
tttttttaagcagtggtatcaacgcagagtacnngtagacctnncatatcggnntttttttttttttttttttttttttttttt

SEQ ID NO: 2944 - DNA, 84 bp, Artificial
  Barcode component
  misc_feature (33)..(34): n is a, c, g, or t
  misc_feature (43)..(44): n is a, c, g, or t
  misc_feature (53)..(54): n is a, c, g, or t
tttttttaagcagtggtatcaacgcagagtacnngtagacctnncttcggtanntttttttttttttttttttttttttttttt

SEQ ID NO: 2945 - DNA, 84 bp, Artificial
  Barcode component
  misc_feature (33)..(34): n is a, c, g, or t
  misc_feature (43)..(44): n is a, c, g, or t
  misc_feature (53)..(54): n is a, c, g, or t
tttttttaagcagtggtatcaacgcagagtacnngtagacctnntcctaacgnntttttttttttttttttttttttttttttt

SEQ ID NO: 2946 - DNA, 84 bp, Artificial
  Barcode component
  misc_feature (33)..(34): n is a, c, g, or t
  misc_feature (43)..(44): n is a, c, g, or t
  misc_feature (53)..(54): n is a, c, g, or t
tttttttaagcagtggtatcaacgcagagtacnngtagacctnngtaagccanntttttttttttttttttttttttttttttt

SEQ ID NO: 2947 - DNA, 84 bp, Artificial
  Barcode component
  misc_feature (33)..(34): n is a, c, g, or t
  misc_feature (43)..(44): n is a, c, g, or t
  misc_feature (53)..(54): n is a, c, g, or t
tttttttaagcagtggtatcaacgcagagtacnngtagacctnntaaggtggnntttttttttttttttttttttttttttttt

SEQ ID NO: 2948 - DNA, 84 bp, Artificial
  Barcode component
  misc_feature (33)..(34): n is a, c, g, or t
  misc_feature (43)..(44): n is a, c, g, or t
  misc_feature (53)..(54): n is a, c, g, or t
tttttttaagcagtggtatcaacgcagagtacnngtagacctnnggtaagctnntttttttttttttttttttttttttttttt

SEQ ID NO: 2949 - DNA, 84 bp, Artificial
  Barcode component
  misc_feature (33)..(34): n is a, c, g, or t
  misc_feature (43)..(44): n is a, c, g, or t
  misc_feature (53)..(54): n is a, c, g, or t
tttttttaagcagtggtatcaacgcagagtacnngtagacctnntgtgtcganntttttttttttttttttttttttttttttt

SEQ ID NO: 2950 - DNA, 84 bp, Artificial
  Barcode component
  misc_feature (33)..(34): n is a, c, g, or t
  misc_feature (43)..(44): n is a, c, g, or t
  misc_feature (53)..(54): n is a, c, g, or t
tttttttaagcagtggtatcaacgcagagtacnngtagacctnngagcatganntttttttttttttttttttttttttttttt

SEQ ID NO: 2951 - DNA, 84 bp, Artificial
  Barcode component
  misc_feature (33)..(34): n is a, c, g, or t
  misc_feature (43)..(44): n is a, c, g, or t
  misc_feature (53)..(54): n is a, c, g, or t
tttttttaagcagtggtatcaacgcagagtacnngtagacctnntcgaagtcnntttttttttttttttttttttttttttttt

SEQ ID NO: 2952 - DNA, 84 bp, Artificial
  Barcode component
  misc_feature (33)..(34): n is a, c, g, or t
  misc_feature (43)..(44): n is a, c, g, or t
  misc_feature (53)..(54): n is a, c, g, or t
tttttttaagcagtggtatcaacgcagagtacnngtagacctnnggtgaacanntttttttttttttttttttttttttttttt

SEQ ID NO: 2953 - DNA, 84 bp, Artificial
  Barcode component
  misc_feature (33)..(34): n is a, c, g, or t
  misc_feature (43)..(44): n is a, c, g, or t
  misc_feature (53)..(54): n is a, c, g, or t
tttttttaagcagtggtatcaacgcagagtacnngtagacctnnacatgcacnntttttttttttttttttttttttttttttt

SEQ ID NO: 2954 - DNA, 84 bp, Artificial
  Barcode component
  misc_feature (33)..(34): n is a, c, g, or t
  misc_feature (43)..(44): n is a, c, g, or t
  misc_feature (53)..(54): n is a, c, g, or t
tttttttaagcagtggtatcaacgcagagtacnngtagacctnnccaacagtnntttttttttttttttttttttttttttttt

SEQ ID NO: 2955 - DNA, 84 bp, Artificial
  Barcode component
  misc_feature (33)..(34): n is a, c, g, or t
  misc_feature (43)..(44): n is a, c, g, or t
  misc_feature (53)..(54): n is a, c, g, or t
tttttttaagcagtggtatcaacgcagagtacnngtagacctnnagaacagcnntttttttttttttttttttttttttttttt

SEQ ID NO: 2956 - DNA, 84 bp, Artificial
  Barcode component
  misc_feature (33)..(34): n is a, c, g, or t
  misc_feature (43)..(44): n is a, c, g, or t
  misc_feature (53)..(54): n is a, c, g, or t
tttttttaagcagtggtatcaacgcagagtacnngtagacctnngaacacgtnntttttttttttttttttttttttttttttt

SEQ ID NO: 2957 - DNA, 84 bp, Artificial
  Barcode component
  misc_feature (33)..(34): n is a, c, g, or t
  misc_feature (43)..(44): n is a, c, g, or t
  misc_feature (53)..(54): n is a, c, g, or t
tttttttaagcagtggtatcaacgcagagtacnngtagacctnnggtcttcanntttttttttttttttttttttttttttttt

SEQ ID NO: 2958 - DNA, 84 bp, Artificial
  Barcode component
  misc_feature (33)..(34): n is a, c, g, or t
  misc_feature (43)..(44): n is a, c, g, or t
  misc_feature (53)..(54): n is a, c, g, or t
tttttttaagcagtggtatcaacgcagagtacnngtagacctnnaggttcagnntttttttttttttttttttttttttttttt

SEQ ID NO: 2959 - DNA, 84 bp, Artificial
  Barcode component
  misc_feature (33)..(34): n is a, c, g, or t
  misc_feature (43)..(44): n is a, c, g, or t
  misc_feature (53)..(54): n is a, c, g, or t
tttttttaagcagtggtatcaacgcagagtacnngtagacctnnctagagcanntttttttttttttttttttttttttttttt

SEQ ID NO: 2960 - DNA, 84 bp, Artificial
  Barcode component
  misc_feature (33)..(34): n is a, c, g, or t
  misc_feature (43)..(44): n is a, c, g, or t
  misc_feature (53)..(54): n is a, c, g, or t
tttttttaagcagtggtatcaacgcagagtacnngtagacctnncttctagcnntttttttttttttttttttttttttttttt

SEQ ID NO: 2961 - DNA, 84 bp, Artificial
  Barcode component
  misc_feature (33)..(34): n is a, c, g, or t
  misc_feature (43)..(44): n is a, c, g, or t
  misc_feature (53)..(54): n is a, c, g, or t
tttttttaagcagtggtatcaacgcagagtacnngtagacctnngagtaacgnntttttttttttttttttttttttttttttt

SEQ ID NO: 2962 - DNA, 84 bp, Artificial
  Barcode component
  misc_feature (33)..(34): n is a, c, g, or t
  misc_feature (43)..(44): n is a, c, g, or t
  misc_feature (53)..(54): n is a, c, g, or t
tttttttaagcagtggtatcaacgcagagtacnngtagacctnnctaagaggnntttttttttttttttttttttttttttttt

SEQ ID NO: 2963 - DNA, 84 bp, Artificial
  Barcode component
  misc_feature (33)..(34): n is a, c, g, or t
  misc_feature (43)..(44): n is a, c, g, or t
  misc_feature (53)..(54): n is a, c, g, or t
tttttttaagcagtggtatcaacgcagagtacnngtagacctnnacgtgtagnntttttttttttttttttttttttttttttt

SEQ ID NO: 2964 - DNA, 84 bp, Artificial
  Barcode component
  misc_feature (33)..(34): n is a, c, g, or t
  misc_feature (43)..(44): n is a, c, g, or t
  misc_feature (53)..(54): n is a, c, g, or t
tttttttaagcagtggtatcaacgcagagtacnngtagacctnnactacaggnntttttttttttttttttttttttttttttt

SEQ ID NO: 2965 - DNA, 84 bp, Artificial
  Barcode component
  misc_feature (33)..(34): n is a, c, g, or t
  misc_feature (43)..(44): n is a, c, g, or t
  misc_feature (53)..(54): n is a, c, g, or t
tttttttaagcagtggtatcaacgcagagtacnngtagacctnntacaggtcnntttttttttttttttttttttttttttttt

SEQ ID NO: 2966 - DNA, 84 bp, Artificial
  Barcode component
  misc_feature (33)..(34): n is a, c, g, or t
  misc_feature (43)..(44): n is a, c, g, or t
  misc_feature (53)..(54): n is a, c, g, or t
tttttttaagcagtggtatcaacgcagagtacnngtagacctnnctcacatgnntttttttttttttttttttttttttttttt

SEQ ID NO: 2967 - DNA, 84 bp, Artificial
  Barcode component
  misc_feature (33)..(34): n is a, c, g, or t
  misc_feature (43)..(44): n is a, c, g, or t
  misc_feature (53)..(54): n is a, c, g, or t
tttttttaagcagtggtatcaacgcagagtacnngtagacctnnactaggagnntttttttttttttttttttttttttttttt

SEQ ID NO: 2968 - DNA, 84 bp, Artificial
  Barcode component
  misc_feature (33)..(34): n is a, c, g, or t
  misc_feature (43)..(44): n is a, c, g, or t
  misc_feature (53)..(54): n is a, c, g, or t
tttttttaagcagtggtatcaacgcagagtacnngtagacctnnccatagganntttttttttttttttttttttttttttttt

SEQ ID NO: 2969 - DNA, 84 bp, Artificial
  Barcode component
  misc_feature (33)..(34): n is a, c, g, or t
  misc_feature (43)..(44): n is a, c, g, or t
  misc_feature (53)..(54): n is a, c, g, or t
tttttttaagcagtggtatcaacgcagagtacnngtagacctnnggagaatcnntttttttttttttttttttttttttttttt

SEQ ID NO: 2970 - DNA, 84 bp, Artificial
  Barcode component
  misc_feature (33)..(34): n is a, c, g, or t
  misc_feature (43)..(44): n is a, c, g, or t
  misc_feature (53)..(54): n is a, c, g, or t
tttttttaagcagtggtatcaacgcagagtacnngtagacctnngccaagaanntttttttttttttttttttttttttttttt

SEQ ID NO: 2971 - DNA, 84 bp, Artificial
  Barcode component
  misc_feature (33)..(34): n is a, c, g, or t
  misc_feature (43)..(44): n is a, c, g, or t
  misc_feature (53)..(54): n is a, c, g, or t
tttttttaagcagtggtatcaacgcagagtacnngtagacctnnaaggcaagnntttttttttttttttttttttttttttttt

SEQ ID NO: 2972 - DNA, 84 bp, Artificial
  Barcode component
  misc_feature (33)..(34): n is a, c, g, or t
  misc_feature (43)..(44): n is a, c, g, or t
  misc_feature (53)..(54): n is a, c, g, or t
tttttttaagcagtggtatcaacgcagagtacnngtagacctnnaatgtcgcnntttttttttttttttttttttttttttttt

SEQ ID NO: 2973 - DNA, 84 bp, Artificial
  Barcode component
  misc_feature (33)..(34): n is a, c, g, or t
  misc_feature (43)..(44): n is a, c, g, or t
  misc_feature (53)..(54): n is a, c, g, or t
tttttttaagcagtggtatcaacgcagagtacnngtagacctnnatggaaccnntttttttttttttttttttttttttttttt

SEQ ID NO: 2974 - DNA, 84 bp, Artificial
  Barcode component
  misc_feature (33)..(34): n is a, c, g, or t
  misc_feature (43)..(44): n is a, c, g, or t
  misc_feature (53)..(54): n is a, c, g, or t
tttttttaagcagtggtatcaacgcagagtacnngtagacctnnagaggcatnntttttttttttttttttttttttttttttt

SEQ ID NO: 2975 - DNA, 84 bp, Artificial
  Barcode component
  misc_feature (33)..(34): n is a, c, g, or t
  misc_feature (43)..(44): n is a, c, g, or t
  misc_feature (53)..(54): n is a, c, g, or t
tttttttaagcagtggtatcaacgcagagtacnngtagacctnntgcatagcnntttttttttttttttttttttttttttttt

SEQ ID NO: 2976 - DNA, 84 bp, Artificial
  Barcode component
  misc_feature (33)..(34): n is a, c, g, or t
  misc_feature (43)..(44): n is a, c, g, or t
  misc_feature (53)..(54): n is a, c, g, or t
tttttttaagcagtggtatcaacgcagagtacnngtagacctnnctaacgganntttttttttttttttttttttttttttttt

SEQ ID NO: 2977 - DNA, 84 bp, Artificial
  Barcode component
  misc_feature (33)..(34): n is a, c, g, or t
  misc_feature (43)..(44): n is a, c, g, or t
  misc_feature (53)..(54): n is a, c, g, or t
tttttttaagcagtggtatcaacgcagagtacnngtagacctnntatcgaggnntttttttttttttttttttttttttttttt

SEQ ID NO: 2978 - DNA, 84 bp, Artificial
  Barcode component
  misc_feature (33)..(34): n is a, c, g, or t
  misc_feature (43)..(44): n is a, c, g, or t
  misc_feature (53)..(54): n is a, c, g, or t
tttttttaagcagtggtatcaacgcagagtacnngtagacctnncatagcctnntttttttttttttttttttttttttttttt

SEQ ID NO: 2979 - DNA, 84 bp, Artificial
  Barcode component
  misc_feature (33)..(34): n is a, c, g, or t
  misc_feature (43)..(44): n is a, c, g, or t
  misc_feature (53)..(54): n is a, c, g, or t
tttttttaagcagtggtatcaacgcagagtacnngtagacctnnatcgagacnntttttttttttttttttttttttttttttt

SEQ ID NO: 2980 - DNA, 84 bp, Artificial
  Barcode component
  misc_feature (33)..(34): n is a, c, g, or t
  misc_feature (43)..(44): n is a, c, g, or t
  misc_feature (53)..(54): n is a, c, g, or t
tttttttaagcagtggtatcaacgcagagtacnngtagacctnnggaagagtnntttttttttttttttttttttttttttttt

SEQ ID NO: 2981 - DNA, 84 bp, Artificial
  Barcode component
  misc_feature (33)..(34): n is a, c, g, or t
  misc_feature (43)..(44): n is a, c, g, or t
  misc_feature (53)..(54): n is a, c, g, or t
tttttttaagcagtggtatcaacgcagagtacnngtagacctnnccaagtagnntttttttttttttttttttttttttttttt

SEQ ID NO: 2982 - DNA, 84 bp, Artificial
  Barcode component
  misc_feature (33)..(34): n is a, c, g, or t
  misc_feature (43)..(44): n is a, c, g, or t
  misc_feature (53)..(54): n is a, c, g, or t
tttttttaagcagtggtatcaacgcagagtacnngtagacctnnctgaacagnntttttttttttttttttttttttttttttt

SEQ ID NO: 2983 - DNA, 84 bp, Artificial
  Barcode component
  misc_feature (33)..(34): n is a, c, g, or t
  misc_feature (43)..(44): n is a, c, g, or t
  misc_feature (53)..(54): n is a, c, g, or t
tttttttaagcagtggtatcaacgcagagtacnngtagacctnngtaggttcnntttttttttttttttttttttttttttttt

SEQ ID NO: 2984 - DNA, 84 bp, Artificial
  Barcode component
  misc_feature (33)..(34): n is a, c, g, or t
  misc_feature (43)..(44): n is a, c, g, or t
  misc_feature (53)..(54): n is a, c, g, or t
tttttttaagcagtggtatcaacgcagagtacnngtagacctnngtatggacnntttttttttttttttttttttttttttttt

SEQ ID NO: 2985 - DNA, 84 bp, Artificial
  Barcode component
  misc_feature (33)..(34): n is a, c, g, or t
  misc_feature (43)..(44): n is a, c, g, or t
  misc_feature (53)..(54): n is a, c, g, or t
tttttttaagcagtggtatcaacgcagagtacnngtagacctnntcgcaacanntttttttttttttttttttttttttttttt

SEQ ID NO: 2986 - DNA, 84 bp, Artificial
  Barcode component
  misc_feature (33)..(34): n is a, c, g, or t
  misc_feature (43)..(44): n is a, c, g, or t
  misc_feature (53)..(54): n is a, c, g, or t
tttttttaagcagtggtatcaacgcagagtacnngtagacctnnccgctaatnntttttttttttttttttttttttttttttt

SEQ ID NO: 2987 - DNA, 84 bp, Artificial
  Barcode component
  misc_feature (33)..(34): n is a, c, g, or t
  misc_feature (43)..(44): n is a, c, g, or t
  misc_feature (53)..(54): n is a, c, g, or t
tttttttaagcagtggtatcaacgcagagtacnngtagacctnngattcgcanntttttttttttttttttttttttttttttt

SEQ ID NO: 2988 - DNA, 84 bp, Artificial
  Barcode component
  misc_feature (33)..(34): n is a, c, g, or t
  misc_feature (43)..(44): n is a, c, g, or t
  misc_feature (53)..(54): n is a, c, g, or t
tttttttaagcagtggtatcaacgcagagtacnngtagacctnncgatggaanntttttttttttttttttttttttttttttt

SEQ ID NO: 2989 - DNA, 84 bp, Artificial
  Barcode component
  misc_feature (33)..(34): n is a, c, g, or t
  misc_feature (43)..(44): n is a, c, g, or t
  misc_feature (53)..(54): n is a, c, g, or t
tttttttaagcagtggtatcaacgcagagtacnngtagacctnnagcaagganntttttttttttttttttttttttttttttt

SEQ ID NO: 2990 - DNA, 84 bp, Artificial
  Barcode component
  misc_feature (33)..(34): n is a, c, g, or t
  misc_feature (43)..(44): n is a, c, g, or t
  misc_feature (53)..(54): n is a, c, g, or t
tttttttaagcagtggtatcaacgcagagtacnngtagacctnncgtagcaanntttttttttttttttttttttttttttttt

SEQ ID NO: 2991 - DNA, 84 bp, Artificial
  Barcode component
  misc_feature (33)..(34): n is a, c, g, or t
  misc_feature (43)..(44): n is a, c, g, or t
  misc_feature (53)..(54): n is a, c, g, or t
tttttttaagcagtggtatcaacgcagagtacnngtagacctnntggcagtanntttttttttttttttttttttttttttttt

SEQ ID NO: 2992 - DNA, 84 bp, Artificial
  Barcode component
  misc_feature (33)..(34): n is a, c, g, or t
  misc_feature (43)..(44): n is a, c, g, or t
  misc_feature (53)..(54): n is a, c, g, or t
tttttttaagcagtggtatcaacgcagagtacnngtagacctnncggtagttnntttttttttttttttttttttttttttttt

SEQ ID NO: 2993 - DNA, 84 bp, Artificial
  Barcode component
  misc_feature (33)..(34): n is a, c, g, or t
  misc_feature (43)..(44): n is a, c, g, or t
  misc_feature (53)..(54): n is a, c, g, or t
tttttttaagcagtggtatcaacgcagagtacnngtagacctnntgacttcgnntttttttttttttttttttttttttttttt

SEQ ID NO: 2994 - DNA, 84 bp, Artificial
  Barcode component
  misc_feature (33)..(34): n is a, c, g, or t
  misc_feature (43)..(44): n is a, c, g, or t
  misc_feature (53)..(54): n is a, c, g, or t
tttttttaagcagtggtatcaacgcagagtacnngtagacctnngagtgcaanntttttttttttttttttttttttttttttt

SEQ ID NO: 2995 - DNA, 84 bp, Artificial
  Barcode component
  misc_feature (33)..(34): n is a, c, g, or t
  misc_feature (43)..(44): n is a, c, g, or t
  misc_feature (53)..(54): n is a, c, g, or t
tttttttaagcagtggtatcaacgcagagtacnngtagacctnnacggtaacnntttttttttttttttttttttttttttttt

SEQ ID NO: 2996 - DNA, 84 bp, Artificial
  Barcode component
  misc_feature (33)..(34): n is a, c, g, or t
  misc_feature (43)..(44): n is a, c, g, or t
  misc_feature (53)..(54): n is a, c, g, or t
tttttttaagcagtggtatcaacgcagagtacnngtagacctnnaagtggtgnntttttttttttttttttttttttttttttt

SEQ ID NO: 2997 - DNA, 84 bp, Artificial
  Barcode component
  misc_feature (33)..(34): n is a, c, g, or t
  misc_feature (43)..(44): n is a, c, g, or t
  misc_feature (53)..(54): n is a, c, g, or t
tttttttaagcagtggtatcaacgcagagtacnngtagacctnnggagacaanntttttttttttttttttttttttttttttt

SEQ ID NO: 2998 - DNA, 84 bp, Artificial
  Barcode component
  misc_feature (33)..(34): n is a, c, g, or t
  misc_feature (43)..(44): n is a, c, g, or t
  misc_feature (53)..(54): n is a, c, g, or t
tttttttaagcagtggtatcaacgcagagtacnngtagacctnntcaaggacnntttttttttttttttttttttttttttttt

SEQ ID NO: 2999 - DNA, 84 bp, Artificial
  Barcode component
  misc_feature (33)..(34): n is a, c, g, or t
  misc_feature (43)..(44): n is a, c, g, or t
  misc_feature (53)..(54): n is a, c, g, or t
tttttttaagcagtggtatcaacgcagagtacnngtagacctnnaagagagcnntttttttttttttttttttttttttttttt

SEQ ID NO: 3000 - DNA, 84 bp, Artificial
  Barcode component
  misc_feature (33)..(34): n is a, c, g, or t
  misc_feature (43)..(44): n is a, c, g, or t
  misc_feature (53)..(54): n is a, c, g, or t
tttttttaagcagtggtatcaacgcagagtacnngtagacctnncgagagatnntttttttttttttttttttttttttttttt

SEQ ID NO: 3001 - DNA, 84 bp, Artificial
  Barcode component
  misc_feature (33)..(34): n is a, c, g, or t
  misc_feature (43)..(44): n is a, c, g, or t
  misc_feature (53)..(54): n is a, c, g, or t
tttttttaagcagtggtatcaacgcagagtacnngtagacctnnacagatggnntttttttttttttttttttttttttttttt

SEQ ID NO: 3002 - DNA, 84 bp, Artificial
  Barcode component
  misc_feature (33)..(34): n is a, c, g, or t
  misc_feature (43)..(44): n is a, c, g, or t
  misc_feature (53)..(54): n is a, c, g, or t
tttttttaagcagtggtatcaacgcagagtacnngtagacctnnaggagtcanntttttttttttttttttttttttttttttt

SEQ ID NO: 3003 - DNA, 84 bp, Artificial
  Barcode component
  misc_feature (33)..(34): n is a, c, g, or t
  misc_feature (43)..(44): n is a, c, g, or t
  misc_feature (53)..(54): n is a, c, g, or t
tttttttaagcagtggtatcaacgcagagtacnngtagacctnncgtgttacnntttttttttttttttttttttttttttttt

SEQ ID NO: 3004 - DNA, 84 bp, Artificial
  Barcode component
  misc_feature (33)..(34): n is a, c, g, or t
  misc_feature (43)..(44): n is a, c, g, or t
  misc_feature (53)..(54): n is a, c, g, or t
tttttttaagcagtggtatcaacgcagagtacnngtagacctnntagtgtgcnntttttttttttttttttttttttttttttt

SEQ ID NO: 3005 - DNA, 84 bp, Artificial
  Barcode component
  misc_feature (33)..(34): n is a, c, g, or t
  misc_feature (43)..(44): n is a, c, g, or t
  misc_feature (53)..(54): n is a, c, g, or t
tttttttaagcagtggtatcaacgcagagtacnngtagacctnnctcatgacnntttttttttttttttttttttttttttttt

SEQ ID NO: 3006 - DNA, 84 bp, Artificial
  Barcode component
  misc_feature (33)..(34): n is a, c, g, or t
  misc_feature (43)..(44): n is a, c, g, or t
  misc_feature (53)..(54): n is a, c, g, or t
tttttttaagcagtggtatcaacgcagagtacnngtagacctnngtatccagnntttttttttttttttttttttttttttttt

SEQ ID NO: 3007 - DNA, 84 bp, Artificial
  Barcode component
  misc_feature (33)..(34): n is a, c, g, or t
  misc_feature (43)..(44): n is a, c, g, or t
  misc_feature (53)..(54): n is a, c, g, or t
tttttttaagcagtggtatcaacgcagagtacnngtagacctnnacgcctatnntttttttttttttttttttttttttttttt

SEQ ID NO: 3008 - DNA, 84 bp, Artificial
  Barcode component
  misc_feature (33)..(34): n is a, c, g, or t
  misc_feature (43)..(44): n is a, c, g, or t
  misc_feature (53)..(54): n is a, c, g, or t
tttttttaagcagtggtatcaacgcagagtacnngtagacctnnaacgacctnntttttttttttttttttttttttttttttt

SEQ ID NO: 3009 - DNA, 84 bp, Artificial
  Barcode component
  misc_feature (33)..(34): n is a, c, g, or t
  misc_feature (43)..(44): n is a, c, g, or t
  misc_feature (53)..(54): n is a, c, g, or t
tttttttaagcagtggtatcaacgcagagtacnngtagacctnnatcaggctnntttttttttttttttttttttttttttttt

SEQ ID NO: 3010 - DNA, 84 bp, Artificial
  Barcode component
  misc_feature (33)..(34): n is a, c, g, or t
  misc_feature (43)..(44): n is a, c, g, or t
  misc_feature (53)..(54): n is a, c, g, or t
tttttttaagcagtggtatcaacgcagagtacnngtagacctnncaagttcgnntttttttttttttttttttttttttttttt

SEQ ID NO: 3011 - DNA, 84 bp, Artificial
  Barcode component
  misc_feature (33)..(34): n is a, c, g, or t
  misc_feature (43)..(44): n is a, c, g, or t
  misc_feature (53)..(54): n is a, c, g, or t
tttttttaagcagtggtatcaacgcagagtacnngtagacctnntagccaganntttttttttttttttttttttttttttttt

SEQ ID NO: 3012 - DNA, 84 bp, Artificial
  Barcode component
  misc_feature (33)..(34): n is a, c, g, or t
  misc_feature (43)..(44): n is a, c, g, or t
  misc_feature (53)..(54): n is a, c, g, or t
tttttttaagcagtggtatcaacgcagagtacnngtagacctnncaatcacgnntttttttttttttttttttttttttttttt

SEQ ID NO: 3013 - DNA, 84 bp, Artificial
  Barcode component
  misc_feature (33)..(34): n is a, c, g, or t
  misc_feature (43)..(44): n is a, c, g, or t
  misc_feature (53)..(54): n is a, c, g, or t
tttttttaagcagtggtatcaacgcagagtacnngtagacctnngcaacaagnntttttttttttttttttttttttttttttt

SEQ ID NO: 3014 - DNA, 84 bp, Artificial
  Barcode component
  misc_feature (33)..(34): n is a, c, g, or t
  misc_feature (43)..(44): n is a, c, g, or t
  misc_feature (53)..(54): n is a, c, g, or t
tttttttaagcagtggtatcaacgcagagtacnngtagacctnncacgacaanntttttttttttttttttttttttttttttt

SEQ ID NO: 3015 - DNA, 84 bp, Artificial
  Barcode component
  misc_feature (33)..(34): n is a, c, g, or t
  misc_feature (43)..(44): n is a, c, g, or t
  misc_feature (53)..(54): n is a, c, g, or t
tttttttaagcagtggtatcaacgcagagtacnngtagacctnntacggaganntttttttttttttttttttttttttttttt

SEQ ID NO: 3016 - DNA, 84 bp, Artificial
  Barcode component
  misc_feature (33)..(34): n is a, c, g, or t
  misc_feature (43)..(44): n is a, c, g, or t
  misc_feature (53)..(54): n is a, c, g, or t
tttttttaagcagtggtatcaacgcagagtacnngtagacctnncgacaaganntttttttttttttttttttttttttttttt

SEQ ID NO: 3017 - DNA, 84 bp, Artificial
  Barcode component
  misc_feature (33)..(34): n is a, c, g, or t
  misc_feature (43)..(44): n is a, c, g, or t
  misc_feature (53)..(54): n is a, c, g, or t
tttttttaagcagtggtatcaacgcagagtacnngtagacctnncgaagtganntttttttttttttttttttttttttttttt

SEQ ID NO: 3018 - DNA, 84 bp, Artificial
  Barcode component
  misc_feature (33)..(34): n is a, c, g, or t
  misc_feature (43)..(44): n is a, c, g, or t
  misc_feature (53)..(54): n is a, c, g, or t
tttttttaagcagtggtatcaacgcagagtacnngtagacctnnagctggtanntttttttttttttttttttttttttttttt

SEQ ID NO: 3019 - DNA, 84 bp, Artificial
  Barcode component
  misc_feature (33)..(34): n is a, c, g, or t
  misc_feature (43)..(44): n is a, c, g, or t
  misc_feature (53)..(54): n is a, c, g, or t
tttttttaagcagtggtatcaacgcagagtacnngtagacctnnaactaggcnntttttttttttttttttttttttttttttt

SEQ ID NO: 3020 - DNA, 84 bp, Artificial
  Barcode component
  misc_feature (33)..(34): n is a, c, g, or t
  misc_feature (43)..(44): n is a, c, g, or t
  misc_feature (53)..(54): n is a, c, g, or t
tttttttaagcagtggtatcaacgcagagtacnngtagacctnncagcaagtnntttttttttttttttttttttttttttttt

SEQ ID NO: 3021 - DNA, 84 bp, Artificial
  Barcode component
  misc_feature (33)..(34): n is a, c, g, or t
  misc_feature (43)..(44): n is a, c, g, or t
  misc_feature (53)..(54): n is a, c, g, or t
tttttttaagcagtggtatcaacgcagagtacnngtagacctnnacgaggtanntttttttttttttttttttttttttttttt

SEQ ID NO: 3022 - DNA, 84 bp, Artificial
  Barcode component
  misc_feature (33)..(34): n is a, c, g, or t
  misc_feature (43)..(44): n is a, c, g, or t
  misc_feature (53)..(54): n is a, c, g, or t
tttttttaagcagtggtatcaacgcagagtacnngtagacctnncatcttccnntttttttttttttttttttttttttttttt

SEQ ID NO: 3023 - DNA, 84 bp, Artificial
  Barcode component
  misc_feature (33)..(34): n is a, c, g, or t
  misc_feature (43)..(44): n is a, c, g, or t
  misc_feature (53)..(54): n is a, c, g, or t
tttttttaagcagtggtatcaacgcagagtacnngtagacctnncctgaatcnntttttttttttttttttttttttttttttt

SEQ ID NO: 3024 - DNA, 84 bp, Artificial
  Barcode component
  misc_feature (33)..(34): n is a, c, g, or t
  misc_feature (43)..(44): n is a, c, g, or t
  misc_feature (53)..(54): n is a, c, g, or t
tttttttaagcagtggtatcaacgcagagtacnngtagacctnntgcagactnntttttttttttttttttttttttttttttt

SEQ ID NO: 3025 - DNA, 84 bp, Artificial
  Barcode component
  misc_feature (33)..(34): n is a, c, g, or t
  misc_feature (43)..(44): n is a, c, g, or t
  misc_feature (53)..(54): n is a, c, g, or t
tttttttaagcagtggtatcaacgcagagtacnngtagacctnnagatgtggnntttttttttttttttttttttttttttttt

SEQ ID NO: 3026 - DNA, 84 bp, Artificial
  Barcode component
  misc_feature (33)..(34): n is a, c, g, or t
  misc_feature (43)..(44): n is a, c, g, or t
  misc_feature (53)..(54): n is a, c, g, or t
tttttttaagcagtggtatcaacgcagagtacnngtagacctnnagttcgacnntttttttttttttttttttttttttttttt

SEQ ID NO: 3027 - DNA, 84 bp, Artificial
  Barcode component
  misc_feature (33)..(34): n is a, c, g, or t
  misc_feature (43)..(44): n is a, c, g, or t
  misc_feature (53)..(54): n is a, c, g, or t
tttttttaagcagtggtatcaacgcagagtacnngtagacctnnacaacctcnntttttttttttttttttttttttttttttt

SEQ ID NO: 3028 - DNA, 84 bp, Artificial
  Barcode component
  misc_feature (33)..(34): n is a, c, g, or t
  misc_feature (43)..(44): n is a, c, g, or t
  misc_feature (53)..(54): n is a, c, g, or t
tttttttaagcagtggtatcaacgcagagtacnngtagacctnncatggtagnntttttttttttttttttttttttttttttt

SEQ ID NO: 3029 - DNA, 84 bp, Artificial
  Barcode component
  misc_feature (33)..(34): n is a, c, g, or t
  misc_feature (43)..(44): n is a, c, g, or t
  misc_feature (53)..(54): n is a, c, g, or t
tttttttaagcagtggtatcaacgcagagtacnngtagacctnncgtatctcnntttttttttttttttttttttttttttttt

SEQ ID NO: 3030 - DNA, 84 bp, Artificial
  Barcode component
  misc_feature (33)..(34): n is a, c, g, or t
  misc_feature (43)..(44): n is a, c, g, or t
  misc_feature (53)..(54): n is a, c, g, or t
tttttttaagcagtggtatcaacgcagagtacnngtagacctnncctagttcnntttttttttttttttttttttttttttttt

SEQ ID NO: 3031 - DNA, 84 bp, Artificial
  Barcode component
  misc_feature (33)..(34): n is a, c, g, or t
  misc_feature (43)..(44): n is a, c, g, or t
  misc_feature (53)..(54): n is a, c, g, or t
tttttttaagcagtggtatcaacgcagagtacnngtagacctnncaagagtcnntttttttttttttttttttttttttttttt

SEQ ID NO: 3032 - DNA, 84 bp, Artificial
  Barcode component
  misc_feature (33)..(34): n is a, c, g, or t
  misc_feature (43)..(44): n is a, c, g, or t
  misc_feature (53)..(54): n is a, c, g, or t
tttttttaagcagtggtatcaacgcagagtacnncaattggcnnaatcggcanntttttttttttttttttttttttttttttt

SEQ ID NO: 3033 - DNA, 84 bp, Artificial
  Barcode component
  misc_feature (33)..(34): n is a, c, g, or t
  misc_feature (43)..(44): n is a, c, g, or t
  misc_feature (53)..(54): n is a, c, g, or t
tttttttaagcagtggtatcaacgcagagtacnncaattggcnntacggcatnntttttttttttttttttttttttttttttt

SEQ ID NO: 3034 - DNA, 84 bp, Artificial
  Barcode component
  misc_feature (33)..(34): n is a, c, g, or t
  misc_feature (43)..(44): n is a, c, g, or t
  misc_feature (53)..(54): n is a, c, g, or t
tttttttaagcagtggtatcaacgcagagtacnncaattggcnnttggatcgnntttttttttttttttttttttttttttttt

SEQ ID NO: 3035 - DNA, 84 bp, Artificial
  Barcode component
  misc_feature (33)..(34): n is a, c, g, or t
  misc_feature (43)..(44): n is a, c, g, or t
  misc_feature (53)..(54): n is a, c, g, or t
tttttttaagcagtggtatcaacgcagagtacnncaattggcnntggaacganntttttttttttttttttttttttttttttt

SEQ ID NO: 3036 - DNA, 84 bp, Artificial
  Barcode component
  misc_feature (33)..(34): n is a, c, g, or t
  misc_feature (43)..(44): n is a, c, g, or t
  misc_feature (53)..(54): n is a, c, g, or t
tttttttaagcagtggtatcaacgcagagtacnncaattggcnnggcaatcanntttttttttttttttttttttttttttttt

SEQ ID NO: 3037 - DNA, 84 bp, Artificial
  Barcode component
  misc_feature (33)..(34): n is a, c, g, or t
  misc_feature (43)..(44): n is a, c, g, or t
  misc_feature (53)..(54): n is a, c, g, or t
tttttttaagcagtggtatcaacgcagagtacnncaattggcnngaatccganntttttttttttttttttttttttttttttt

SEQ ID NO: 3038 - DNA, 84 bp, Artificial
  Barcode component
  misc_feature (33)..(34): n is a, c, g, or t
  misc_feature (43)..(44): n is a, c, g, or t
  misc_feature (53)..(54): n is a, c, g, or t
tttttttaagcagtggtatcaacgcagagtacnncaattggcnnttacggtgnntttttttttttttttttttttttttttttt

SEQ ID NO: 3039 - DNA, 84 bp, Artificial
  Barcode component
  misc_feature (33)..(34): n is a, c, g, or t
  misc_feature (43)..(44): n is a, c, g, or t
  misc_feature (53)..(54): n is a, c, g, or t
tttttttaagcagtggtatcaacgcagagtacnncaattggcnncatatcggnntttttttttttttttttttttttttttttt

SEQ ID NO: 3040 - DNA, 84 bp, Artificial
  Barcode component
  misc_feature (33)..(34): n is a, c, g, or t
  misc_feature (43)..(44): n is a, c, g, or t
  misc_feature (53)..(54): n is a, c, g, or t
tttttttaagcagtggtatcaacgcagagtacnncaattggcnncttcggtanntttttttttttttttttttttttttttttt

SEQ ID NO: 3041 - DNA, 84 bp, Artificial
  Barcode component
  misc_feature (33)..(34): n is a, c, g, or t
  misc_feature (43)..(44): n is a, c, g, or t
  misc_feature (53)..(54): n is a, c, g, or t
tttttttaagcagtggtatcaacgcagagtacnncaattggcnntcctaacgnntttttttttttttttttttttttttttttt

SEQ ID NO: 3042 - DNA, 84 bp, Artificial
  Barcode component
  misc_feature (33)..(34): n is a, c, g, or t
  misc_feature (43)..(44): n is a, c, g, or t
  misc_feature (53)..(54): n is a, c, g, or t
tttttttaagcagtggtatcaacgcagagtacnncaattggcnngtaagccanntttttttttttttttttttttttttttttt

SEQ ID NO: 3043 - DNA, 84 bp, Artificial
  Barcode component
  misc_feature (33)..(34): n is a, c, g, or t
  misc_feature (43)..(44): n is a, c, g, or t
  misc_feature (53)..(54): n is a, c, g, or t
tttttttaagcagtggtatcaacgcagagtacnncaattggcnntaaggtggnntttttttttttttttttttttttttttttt

SEQ ID NO: 3044 - DNA, 84 bp, Artificial
  Barcode component
  misc_feature (33)..(34): n is a, c, g, or t
  misc_feature (43)..(44): n is a, c, g, or t
  misc_feature (53)..(54): n is a, c, g, or t
tttttttaagcagtggtatcaacgcagagtacnncaattggcnnggtaagctnntttttttttttttttttttttttttttttt

SEQ ID NO: 3045 - DNA, 84 bp, Artificial
  Barcode component
  misc_feature (33)..(34): n is a, c, g, or t
  misc_feature (43)..(44): n is a, c, g, or t
  misc_feature (53)..(54): n is a, c, g, or t
tttttttaagcagtggtatcaacgcagagtacnncaattggcnntgtgtcganntttttttttttttttttttttttttttttt

SEQ ID NO: 3046 - DNA, 84 bp, Artificial
  Barcode component
  misc_feature (33)..(34): n is a, c, g, or t
  misc_feature (43)..(44): n is a, c, g, or t
  misc_feature (53)..(54): n is a, c, g, or t
tttttttaagcagtggtatcaacgcagagtacnncaattggcnngagcatganntttttttttttttttttttttttttttttt

SEQ ID NO: 3047 - DNA, 84 bp, Artificial
  Barcode component
  misc_feature (33)..(34): n is a, c, g, or t
  misc_feature (43)..(44): n is a, c, g, or t
  misc_feature (53)..(54): n is a, c, g, or t
tttttttaagcagtggtatcaacgcagagtacnncaattggcnntcgaagtcnntttttttttttttttttttttttttttttt

SEQ ID NO: 3048 - DNA, 84 bp, Artificial
  Barcode component
  misc_feature (33)..(34): n is a, c, g, or t
  misc_feature (43)..(44): n is a, c, g, or t
  misc_feature (53)..(54): n is a, c, g, or t
tttttttaagcagtggtatcaacgcagagtacnncaattggcnnggtgaacanntttttttttttttttttttttttttttttt

SEQ ID NO: 3049 - DNA, 84 bp, Artificial
  Barcode component
  misc_feature (33)..(34): n is a, c, g, or t
  misc_feature (43)..(44): n is a, c, g, or t
  misc_feature (53)..(54): n is a, c, g, or t
tttttttaagcagtggtatcaacgcagagtacnncaattggcnnacatgcacnntttttttttttttttttttttttttttttt

SEQ ID NO: 3050 - DNA, 84 bp, Artificial
  Barcode component
  misc_feature (33)..(34): n is a, c, g, or t
  misc_feature (43)..(44): n is a, c, g, or t
  misc_feature (53)..(54): n is a, c, g, or t
tttttttaagcagtggtatcaacgcagagtacnncaattggcnnccaacagtnntttttttttttttttttttttttttttttt

SEQ ID NO: 3051 - DNA, 84 bp, Artificial
  Barcode component
  misc_feature (33)..(34): n is a, c, g, or t
  misc_feature (43)..(44): n is a, c, g, or t
  misc_feature (53)..(54): n is a, c, g, or t
tttttttaagcagtggtatcaacgcagagtacnncaattggcnnagaacagcnntttttttttttttttttttttttttttttt

SEQ ID NO: 3052 - DNA, 84 bp, Artificial
  Barcode component
  misc_feature (33)..(34): n is a, c, g, or t
  misc_feature (43)..(44): n is a, c, g, or t
  misc_feature (53)..(54): n is a, c, g, or t
tttttttaagcagtggtatcaacgcagagtacnncaattggcnngaacacgtnntttttttttttttttttttttttttttttt

SEQ ID NO: 3053 - DNA, 84 bp, Artificial
  Barcode component
  misc_feature (33)..(34): n is a, c, g, or t
  misc_feature (43)..(44): n is a, c, g, or t
  misc_feature (53)..(54): n is a, c, g, or t
tttttttaagcagtggtatcaacgcagagtacnncaattggcnnggtcttcanntttttttttttttttttttttttttttttt

SEQ ID NO: 3054 - DNA, 84 bp, Artificial
  Barcode component
  misc_feature (33)..(34): n is a, c, g, or t
  misc_feature (43)..(44): n is a, c, g, or t
  misc_feature (53)..(54): n is a, c, g, or t
tttttttaagcagtggtatcaacgcagagtacnncaattggcnnaggttcagnntttttttttttttttttttttttttttttt

SEQ ID NO: 3055 - DNA, 84 bp, Artificial
  Barcode component
  misc_feature (33)..(34): n is a, c, g, or t
  misc_feature (43)..(44): n is a, c, g, or t
  misc_feature (53)..(54): n is a, c, g, or t
tttttttaagcagtggtatcaacgcagagtacnncaattggcnnctagagcanntttttttttttttttttttttttttttttt

SEQ ID NO: 3056 - DNA, 84 bp, Artificial
  Barcode component
  misc_feature (33)..(34): n is a, c, g, or t
  misc_feature (43)..(44): n is a, c, g, or t
  misc_feature (53)..(54): n is a, c, g, or t
tttttttaagcagtggtatcaacgcagagtacnncaattggcnncttctagcnntttttttttttttttttttttttttttttt

SEQ ID NO: 3057 - DNA, 84 bp, Artificial
  Barcode component
  misc_feature (33)..(34): n is a, c, g, or t
  misc_feature (43)..(44): n is a, c, g, or t
  misc_feature (53)..(54): n is a, c, g, or t
tttttttaagcagtggtatcaacgcagagtacnncaattggcnngagtaacgnntttttttttttttttttttttttttttttt

SEQ ID NO: 3058 - DNA, 84 bp, Artificial
  Barcode component
  misc_feature (33)..(34): n is a, c, g, or t
  misc_feature (43)..(44): n is a, c, g, or t
  misc_feature (53)..(54): n is a, c, g, or t
tttttttaagcagtggtatcaacgcagagtacnncaattggcnnctaagaggnntttttttttttttttttttttttttttttt

SEQ ID NO: 3059 - DNA, 84 bp, Artificial
  Barcode component
  misc_feature (33)..(34): n is a, c, g, or t
  misc_feature (43)..(44): n is a, c, g, or t
  misc_feature (53)..(54): n is a, c, g, or t
tttttttaagcagtggtatcaacgcagagtacnncaattggcnnacgtgtagnntttttttttttttttttttttttttttttt

SEQ ID NO: 3060 - DNA, 84 bp, Artificial
  Barcode component
  misc_feature (33)..(34): n is a, c, g, or t
  misc_feature (43)..(44): n is a, c, g, or t
  misc_feature (53)..(54): n is a, c, g, or t
tttttttaagcagtggtatcaacgcagagtacnncaattggcnnactacaggnntttttttttttttttttttttttttttttt

SEQ ID NO: 3061 - DNA, 84 bp, Artificial
  Barcode component
  misc_feature (33)..(34): n is a, c, g, or t
  misc_feature (43)..(44): n is a, c, g, or t
  misc_feature (53)..(54): n is a, c, g, or t
tttttttaagcagtggtatcaacgcagagtacnncaattggcnntacaggtcnntttttttttttttttttttttttttttttt

SEQ ID NO: 3062 - DNA, 84 bp, Artificial
  Barcode component
  misc_feature (33)..(34): n is a, c, g, or t
  misc_feature (43)..(44): n is a, c, g, or t
  misc_feature (53)..(54): n is a, c, g, or t
tttttttaagcagtggtatcaacgcagagtacnncaattggcnnctcacatgnntttttttttttttttttttttttttttttt

SEQ ID NO: 3063 - DNA, 84 bp, Artificial
  Barcode component
  misc_feature (33)..(34): n is a, c, g, or t
  misc_feature (43)..(44): n is a, c, g, or t
  misc_feature (53)..(54): n is a, c, g, or t
tttttttaagcagtggtatcaacgcagagtacnncaattggcnnactaggagnntttttttttttttttttttttttttttttt

SEQ ID NO: 3064 - DNA, 84 bp, Artificial
  Barcode component
  misc_feature (33)..(34): n is a, c, g, or t
  misc_feature (43)..(44): n is a, c, g, or t
  misc_feature (53)..(54): n is a, c, g, or t
tttttttaagcagtggtatcaacgcagagtacnncaattggcnnccatagganntttttttttttttttttttttttttttttt

SEQ ID NO: 3065 - DNA, 84 bp, Artificial
  Barcode component
  misc_feature (33)..(34): n is a, c, g, or t
  misc_feature (43)..(44): n is a, c, g, or t
  misc_feature (53)..(54): n is a, c, g, or t
tttttttaagcagtggtatcaacgcagagtacnncaattggcnnggagaatcnntttttttttttttttttttttttttttttt

SEQ ID NO: 3066 - DNA, 84 bp, Artificial
  Barcode component
  misc_feature (33)..(34): n is a, c, g, or t
  misc_feature (43)..(44): n is a, c, g, or t
  misc_feature (53)..(54): n is a, c, g, or t
tttttttaagcagtggtatcaacgcagagtacnncaattggcnngccaagaanntttttttttttttttttttttttttttttt

SEQ ID NO: 3067 - DNA, 84 bp, Artificial
  Barcode component
  misc_feature (33)..(34): n is a, c, g, or t
  misc_feature (43)..(44): n is a, c, g, or t
  misc_feature (53)..(54): n is a, c, g, or t
tttttttaagcagtggtatcaacgcagagtacnncaattggcnnaaggcaagnntttttttttttttttttttttttttttttt

SEQ ID NO: 3068 - DNA, 84 bp, Artificial
  Barcode component
  misc_feature (33)..(34): n is a, c, g, or t
  misc_feature (43)..(44): n is a, c, g, or t
  misc_feature (53)..(54): n is a, c, g, or t
tttttttaagcagtggtatcaacgcagagtacnncaattggcnnaatgtcgcnntttttttttttttttttttttttttttttt

SEQ ID NO: 3069 - DNA, 84 bp, Artificial
  Barcode component
  misc_feature (33)..(34): n is a, c, g, or t
  misc_feature (43)..(44): n is a, c, g, or t
  misc_feature (53)..(54): n is a, c, g, or t
tttttttaagcagtggtatcaacgcagagtacnncaattggcnnatggaaccnntttttttttttttttttttttttttttttt

SEQ ID NO: 3070 - DNA, 84 bp, Artificial
  Barcode component
  misc_feature (33)..(34): n is a, c, g, or t
  misc_feature (43)..(44): n is a, c, g, or t
  misc_feature (53)..(54): n is a, c, g, or t
tttttttaagcagtggtatcaacgcagagtacnncaattggcnnagaggcatnntttttttttttttttttttttttttttttt

SEQ ID NO: 3071 - DNA, 84 bp, Artificial
  Barcode component
  misc_feature (33)..(34): n is a, c, g, or t
  misc_feature (43)..(44): n is a, c, g, or t
  misc_feature (53)..(54): n is a, c, g, or t
tttttttaagcagtggtatcaacgcagagtacnncaattggcnntgcatagcnntttttttttttttttttttttttttttttt

SEQ ID NO: 3072 - DNA, 84 bp, Artificial
  Barcode component
  misc_feature (33)..(34): n is a, c, g, or t
  misc_feature (43)..(44): n is a, c, g, or t
  misc_feature (53)..(54): n is a, c, g, or t
tttttttaagcagtggtatcaacgcagagtacnncaattggcnnctaacgganntttttttttttttttttttttttttttttt

SEQ ID NO: 3073 - DNA, 84 bp, Artificial
  Barcode component
  misc_feature (33)..(34): n is a, c, g, or t
  misc_feature (43)..(44): n is a, c, g, or t
  misc_feature (53)..(54): n is a, c, g, or t
tttttttaagcagtggtatcaacgcagagtacnncaattggcnntatcgaggnntttttttttttttttttttttttttttttt

SEQ ID NO: 3074 - DNA, 84 bp, Artificial
  Barcode component
  misc_feature (33)..(34): n is a, c, g, or t
  misc_feature (43)..(44): n is a, c, g, or t
  misc_feature (53)..(54): n is a, c, g, or t
tttttttaagcagtggtatcaacgcagagtacnncaattggcnncatagcctnntttttttttttttttttttttttttttttt

SEQ ID NO: 3075 - DNA, 84 bp, Artificial
  Barcode component
  misc_feature (33)..(34): n is a, c, g, or t
  misc_feature (43)..(44): n is a, c, g, or t
  misc_feature (53)..(54): n is a, c, g, or t
tttttttaagcagtggtatcaacgcagagtacnncaattggcnnatcgagacnntttttttttttttttttttttttttttttt

SEQ ID NO: 3076 - DNA, 84 bp, Artificial
  Barcode component
  misc_feature (33)..(34): n is a, c, g, or t
  misc_feature (43)..(44): n is a, c, g, or t
  misc_feature (53)..(54): n is a, c, g, or t
tttttttaagcagtggtatcaacgcagagtacnncaattggcnnggaagagtnntttttttttttttttttttttttttttttt

SEQ ID NO: 3077 - DNA, 84 bp, Artificial
  Barcode component
  misc_feature (33)..(34): n is a, c, g, or t
  misc_feature (43)..(44): n is a, c, g, or t
  misc_feature (53)..(54): n is a, c, g, or t
tttttttaagcagtggtatcaacgcagagtacnncaattggcnnccaagtagnntttttttttttttttttttttttttttttt

SEQ ID NO: 3078 - DNA, 84 bp, Artificial
  Barcode component
  misc_feature (33)..(34): n is a, c, g, or t
  misc_feature (43)..(44): n is a, c, g, or t
  misc_feature (53)..(54): n is a, c, g, or t
tttttttaagcagtggtatcaacgcagagtacnncaattggcnnctgaacagnntttttttttttttttttttttttttttttt

SEQ ID NO: 3079 - DNA, 84 bp, Artificial
  Barcode component
  misc_feature (33)..(34): n is a, c, g, or t
  misc_feature (43)..(44): n is a, c, g, or t
  misc_feature (53)..(54): n is a, c, g, or t
tttttttaagcagtggtatcaacgcagagtacnncaattggcnngtaggttcnntttttttttttttttttttttttttttttt

SEQ ID NO: 3080 - DNA, 84 bp, Artificial
  Barcode component
  misc_feature (33)..(34): n is a, c, g, or t
  misc_feature (43)..(44): n is a, c, g, or t
  misc_feature (53)..(54): n is a, c, g, or t
tttttttaagcagtggtatcaacgcagagtacnncaattggcnngtatggacnntttttttttttttttttttttttttttttt

SEQ ID NO: 3081 - DNA, 84 bp, Artificial
  Barcode component
  misc_feature (33)..(34): n is a, c, g, or t
  misc_feature (43)..(44): n is a, c, g, or t
  misc_feature (53)..(54): n is a, c, g, or t
tttttttaagcagtggtatcaacgcagagtacnncaattggcnntcgcaacanntttttttttttttttttttttttttttttt

SEQ ID NO: 3082 - DNA, 84 bp, Artificial
  Barcode component
  misc_feature (33)..(34): n is a, c, g, or t
  misc_feature (43)..(44): n is a, c, g, or t
  misc_feature (53)..(54): n is a, c, g, or t
tttttttaagcagtggtatcaacgcagagtacnncaattggcnnccgctaatnntttttttttttttttttttttttttttttt

SEQ ID NO: 3083 - DNA, 84 bp, Artificial
  Barcode component
  misc_feature (33)..(34): n is a, c, g, or t
  misc_feature (43)..(44): n is a, c, g, or t
  misc_feature (53)..(54): n is a, c, g, or t
tttttttaagcagtggtatcaacgcagagtacnncaattggcnngattcgcanntttttttttttttttttttttttttttttt

SEQ ID NO: 3084 - DNA, 84 bp, Artificial
  Barcode component
  misc_feature (33)..(34): n is a, c, g, or t
  misc_feature (43)..(44): n is a, c, g, or t
  misc_feature (53)..(54): n is a, c, g, or t
tttttttaagcagtggtatcaacgcagagtacnncaattggcnncgatggaanntttttttttttttttttttttttttttttt

SEQ ID NO: 3085 - DNA, 84 bp, Artificial
  Barcode component
  misc_feature (33)..(34): n is a, c, g, or t
  misc_feature (43)..(44): n is a, c, g, or t
  misc_feature (53)..(54): n is a, c, g, or t
tttttttaagcagtggtatcaacgcagagtacnncaattggcnnagcaagganntttttttttttttttttttttttttttttt

SEQ ID NO: 3086 - DNA, 84 bp, Artificial
  Barcode component
  misc_feature (33)..(34): n is a, c, g, or t
  misc_feature (43)..(44): n is a, c, g, or t
  misc_feature (53)..(54): n is a, c, g, or t
tttttttaagcagtggtatcaacgcagagtacnncaattggcnncgtagcaanntttttttttttttttttttttttttttttt

SEQ ID NO: 3087 - DNA, 84 bp, Artificial
  Barcode component
  misc_feature (33)..(34): n is a, c, g, or t
  misc_feature (43)..(44): n is a, c, g, or t
  misc_feature (53)..(54): n is a, c, g, or t
tttttttaagcagtggtatcaacgcagagtacnncaattggcnntggcagtanntttttttttttttttttttttttttttttt

SEQ ID NO: 3088 - DNA, 84 bp, Artificial
  Barcode component
  misc_feature (33)..(34): n is a, c, g, or t
  misc_feature (43)..(44): n is a, c, g, or t
  misc_feature (53)..(54): n is a, c, g, or t
tttttttaagcagtggtatcaacgcagagtacnncaattggcnncggtagttnntttttttttttttttttttttttttttttt

SEQ ID NO: 3089 - DNA, 84 bp, Artificial
  Barcode component
  misc_feature (33)..(34): n is a, c, g, or t
  misc_feature (43)..(44): n is a, c, g, or t
  misc_feature (53)..(54): n is a, c, g, or t
tttttttaagcagtggtatcaacgcagagtacnncaattggcnntgacttcgnntttttttttttttttttttttttttttttt

SEQ ID NO: 3090 - DNA, 84 bp, Artificial
  Barcode component
  misc_feature (33)..(34): n is a, c, g, or t
  misc_feature (43)..(44): n is a, c, g, or t
  misc_feature (53)..(54): n is a, c, g, or t
tttttttaagcagtggtatcaacgcagagtacnncaattggcnngagtgcaanntttttttttttttttttttttttttttttt

SEQ ID NO: 3091 - DNA, 84 bp, Artificial
  Barcode component
  misc_feature (33)..(34): n is a, c, g, or t
  misc_feature (43)..(44): n is a, c, g, or t
  misc_feature (53)..(54): n is a, c, g, or t
tttttttaagcagtggtatcaacgcagagtacnncaattggcnnacggtaacnntttttttttttttttttttttttttttttt

SEQ ID NO: 3092 - DNA, 84 bp, Artificial
  Barcode component
  misc_feature (33)..(34): n is a, c, g, or t
  misc_feature (43)..(44): n is a, c, g, or t
  misc_feature (53)..(54): n is a, c, g, or t
tttttttaagcagtggtatcaacgcagagtacnncaattggcnnaagtggtgnntttttttttttttttttttttttttttttt

SEQ ID NO: 3093 - DNA, 84 bp, Artificial
  Barcode component
  misc_feature (33)..(34): n is a, c, g, or t
  misc_feature (43)..(44): n is a, c, g, or t
  misc_feature (53)..(54): n is a, c, g, or t
tttttttaagcagtggtatcaacgcagagtacnncaattggcnnggagacaanntttttttttttttttttttttttttttttt

SEQ ID NO: 3094 - DNA, 84 bp, Artificial
  Barcode component
  misc_feature (33)..(34): n is a, c, g, or t
  misc_feature (43)..(44): n is a, c, g, or t
  misc_feature (53)..(54): n is a, c, g, or t
tttttttaagcagtggtatcaacgcagagtacnncaattggcnntcaaggacnntttttttttttttttttttttttttttttt

SEQ ID NO: 3095 - DNA, 84 bp, Artificial
  Barcode component
  misc_feature (33)..(34): n is a, c, g, or t
  misc_feature (43)..(44): n is a, c, g, or t
  misc_feature (53)..(54): n is a, c, g, or t
tttttttaagcagtggtatcaacgcagagtacnncaattggcnnaagagagcnntttttttttttttttttttttttttttttt

SEQ ID NO: 3096 - DNA, 84 bp, Artificial
  Barcode component
  misc_feature (33)..(34): n is a, c, g, or t
  misc_feature (43)..(44): n is a, c, g, or t
  misc_feature (53)..(54): n is a, c, g, or t
tttttttaagcagtggtatcaacgcagagtacnncaattggcnncgagagatnntttttttttttttttttttttttttttttt

SEQ ID NO: 3097 - DNA, 84 bp, Artificial
  Barcode component
  misc_feature (33)..(34): n is a, c, g, or t
  misc_feature (43)..(44): n is a, c, g, or t
  misc_feature (53)..(54): n is a, c, g, or t
tttttttaagcagtggtatcaacgcagagtacnncaattggcnnacagatggnntttttttttttttttttttttttttttttt

SEQ ID NO: 3098 - DNA, 84 bp, Artificial
  Barcode component
  misc_feature (33)..(34): n is a, c, g, or t
  misc_feature (43)..(44): n is a, c, g, or t
  misc_feature (53)..(54): n is a, c, g, or t
tttttttaagcagtggtatcaacgcagagtacnncaattggcnnaggagtcanntttttttttttttttttttttttttttttt

SEQ ID NO: 3099 - DNA, 84 bp, Artificial
  Barcode component
  misc_feature (33)..(34): n is a, c, g, or t
  misc_feature (43)..(44): n is a, c, g, or t
  misc_feature (53)..(54): n is a, c, g, or t
tttttttaagcagtggtatcaacgcagagtacnncaattggcnncgtgttacnntttttttttttttttttttttttttttttt

SEQ ID NO: 3100 - DNA, 84 bp, Artificial
  Barcode component
  misc_feature (33)..(34): n is a, c, g, or t
  misc_feature (43)..(44): n is a, c, g, or t
  misc_feature (53)..(54): n is a, c, g, or t
tttttttaagcagtggtatcaacgcagagtacnncaattggcnntagtgtgcnntttttttttttttttttttttttttttttt

SEQ ID NO: 3101 - DNA, 84 bp, Artificial
  Barcode component
  misc_feature (33)..(34): n is a, c, g, or t
  misc_feature (43)..(44): n is a, c, g, or t
  misc_feature (53)..(54): n is a, c, g, or t
tttttttaagcagtggtatcaacgcagagtacnncaattggcnnctcatgacnntttttttttttttttttttttttttttttt

SEQ ID NO: 3102 - DNA, 84 bp, Artificial
  Barcode component
  misc_feature (33)..(34): n is a, c, g, or t
  misc_feature (43)..(44): n is a, c, g, or t
  misc_feature (53)..(54): n is a, c, g, or t
tttttttaagcagtggtatcaacgcagagtacnncaattggcnngtatccagnntttttttttttttttttttttttttttttt

SEQ ID NO: 3103 - DNA, 84 bp, Artificial
  Barcode component
  misc_feature (33)..(34): n is a, c, g, or t
  misc_feature (43)..(44): n is a, c, g, or t
  misc_feature (53)..(54): n is a, c, g, or t
tttttttaagcagtggtatcaacgcagagtacnncaattggcnnacgcctatnntttttttttttttttttttttttttttttt

SEQ ID NO: 3104 - DNA, 84 bp, Artificial
  Barcode component
  misc_feature (33)..(34): n is a, c, g, or t
  misc_feature (43)..(44): n is a, c, g, or t
  misc_feature (53)..(54): n is a, c, g, or t
tttttttaagcagtggtatcaacgcagagtacnncaattggcnnaacgacctnntttttttttttttttttttttttttttttt

SEQ ID NO: 3105 - DNA, 84 bp, Artificial
  Barcode component
  misc_feature (33)..(34): n is a, c, g, or t
  misc_feature (43)..(44): n is a, c, g, or t
  misc_feature (53)..(54): n is a, c, g, or t
tttttttaagcagtggtatcaacgcagagtacnncaattggcnnatcaggctnntttttttttttttttttttttttttttttt

SEQ ID NO: 3106 - DNA, 84 bp, Artificial
  Barcode component
  misc_feature (33)..(34): n is a, c, g, or t
  misc_feature (43)..(44): n is a, c, g, or t
  misc_feature (53)..(54): n is a, c, g, or t
tttttttaagcagtggtatcaacgcagagtacnncaattggcnncaagttcgnntttttttttttttttttttttttttttttt

SEQ ID NO: 3107 - DNA, 84 bp, Artificial
  Barcode component
  misc_feature (33)..(34): n is a, c, g, or t
  misc_feature (43)..(44): n is a, c, g, or t
  misc_feature (53)..(54): n is a, c, g, or t
tttttttaagcagtggtatcaacgcagagtacnncaattggcnntagccaganntttttttttttttttttttttttttttttt

SEQ ID NO: 3108 - DNA, 84 bp, Artificial
  Barcode component
  misc_feature (33)..(34): n is a, c, g, or t
  misc_feature (43)..(44): n is a, c, g, or t
  misc_feature (53)..(54): n is a, c, g, or t
tttttttaagcagtggtatcaacgcagagtacnncaattggcnncaatcacgnntttttttttttttttttttttttttttttt

SEQ ID NO: 3109 - DNA, 84 bp, Artificial
  Barcode component
  misc_feature (33)..(34): n is a, c, g, or t
  misc_feature (43)..(44): n is a, c, g, or t
  misc_feature (53)..(54): n is a, c, g, or t
tttttttaagcagtggtatcaacgcagagtacnncaattggcnngcaacaagnntttttttttttttttttttttttttttttt

SEQ ID NO: 3110 - DNA, 84 bp, Artificial
  Barcode component
  misc_feature (33)..(34): n is a, c, g, or t
  misc_feature (43)..(44): n is a, c, g, or t
  misc_feature (53)..(54): n is a, c, g, or t
tttttttaagcagtggtatcaacgcagagtacnncaattggcnncacgacaanntttttttttttttttttttttttttttttt

SEQ ID NO: 3111 - DNA, 84 bp, Artificial
  Barcode component
  misc_feature (33)..(34): n is a, c, g, or t
  misc_feature (43)..(44): n is a, c, g, or t
  misc_feature (53)..(54): n is a, c, g, or t
tttttttaagcagtggtatcaacgcagagtacnncaattggcnntacggaganntttttttttttttttttttttttttttttt

SEQ ID NO: 3112 - DNA, 84 bp, Artificial
  Barcode component
  misc_feature (33)..(34): n is a, c, g, or t
  misc_feature (43)..(44): n is a, c, g, or t
  misc_feature (53)..(54): n is a, c, g, or t
tttttttaagcagtggtatcaacgcagagtacnncaattggcnncgacaaganntttttttttttttttttttttttttttttt

SEQ ID NO: 3113 - DNA, 84 bp, Artificial
  Barcode component
  misc_feature (33)..(34): n is a, c, g, or t
  misc_feature (43)..(44): n is a, c, g, or t
  misc_feature (53)..(54): n is a, c, g, or t
tttttttaagcagtggtatcaacgcagagtacnncaattggcnncgaagtganntttttttttttttttttttttttttttttt

SEQ ID NO: 3114 - DNA, 84 bp, Artificial
  Barcode component
  misc_feature (33)..(34): n is a, c, g, or t
  misc_feature (43)..(44): n is a, c, g, or t
  misc_feature (53)..(54): n is a, c, g, or t
tttttttaagcagtggtatcaacgcagagtacnncaattggcnnagctggtanntttttttttttttttttttttttttttttt

SEQ ID NO: 3115 - DNA, 84 bp, Artificial
  Barcode component
  misc_feature (33)..(34): n is a, c, g, or t
  misc_feature (43)..(44): n is a, c, g, or t
  misc_feature (53)..(54): n is a, c, g, or t
tttttttaagcagtggtatcaacgcagagtacnncaattggcnnaactaggcnntttttttttttttttttttttttttttttt

SEQ ID NO: 3116 - DNA, 84 bp, Artificial
  Barcode component
  misc_feature (33)..(34): n is a, c, g, or t
  misc_feature (43)..(44): n is a, c, g, or t
  misc_feature (53)..(54): n is a, c, g, or t
tttttttaagcagtggtatcaacgcagagtacnncaattggcnncagcaagtnntttttttttttttttttttttttttttttt

SEQ ID NO: 3117 - DNA, 84 bp, Artificial
  Barcode component
  misc_feature (33)..(34): n is a, c, g, or t
  misc_feature (43)..(44): n is a, c, g, or t
  misc_feature (53)..(54): n is a, c, g, or t
tttttttaagcagtggtatcaacgcagagtacnncaattggcnnacgaggtanntttttttttttttttttttttttttttttt

SEQ ID NO: 3118 - DNA, 84 bp, Artificial
  Barcode component
  misc_feature (33)..(34): n is a, c, g, or t
  misc_feature (43)..(44): n is a, c, g, or t
  misc_feature (53)..(54): n is a, c, g, or t
tttttttaagcagtggtatcaacgcagagtacnncaattggcnncatcttccnntttttttttttttttttttttttttttttt

SEQ ID NO: 3119 - DNA, 84 bp, Artificial
  Barcode component
  misc_feature (33)..(34): n is a, c, g, or t
  misc_feature (43)..(44): n is a, c, g, or t
  misc_feature (53)..(54): n is a, c, g, or t
tttttttaagcagtggtatcaacgcagagtacnncaattggcnncctgaatcnntttttttttttttttttttttttttttttt

SEQ ID NO: 3120 - DNA, 84 bp, Artificial
  Barcode component
  misc_feature (33)..(34): n is a, c, g, or t
  misc_feature (43)..(44): n is a, c, g, or t
  misc_feature (53)..(54): n is a, c, g, or t
tttttttaagcagtggtatcaacgcagagtacnncaattggcnntgcagactnntttttttttttttttttttttttttttttt

SEQ ID NO: 3121 - DNA, 84 bp, Artificial
  Barcode component
  misc_feature (33)..(34): n is a, c, g, or t
  misc_feature (43)..(44): n is a, c, g, or t
  misc_feature (53)..(54): n is a, c, g, or t
tttttttaagcagtggtatcaacgcagagtacnncaattggcnnagatgtggnntttttttttttttttttttttttttttttt

SEQ ID NO: 3122 - DNA, 84 bp, Artificial
  Barcode component
  misc_feature (33)..(34): n is a, c, g, or t
  misc_feature (43)..(44): n is a, c, g, or t
  misc_feature (53)..(54): n is a, c, g, or t
tttttttaagcagtggtatcaacgcagagtacnncaattggcnnagttcgacnntttttttttttttttttttttttttttttt

SEQ ID NO: 3123 - DNA, 84 bp, Artificial
  Barcode component
  misc_feature (33)..(34): n is a, c, g, or t
  misc_feature (43)..(44): n is a, c, g, or t
  misc_feature (53)..(54): n is a, c, g, or t
tttttttaagcagtggtatcaacgcagagtacnncaattggcnnacaacctcnntttttttttttttttttttttttttttttt

SEQ ID NO: 3124 - DNA, 84 bp, Artificial
  Barcode component
  misc_feature (33)..(34): n is a, c, g, or t
  misc_feature (43)..(44): n is a, c, g, or t
  misc_feature (53)..(54): n is a, c, g, or t
tttttttaagcagtggtatcaacgcagagtacnncaattggcnncatggtagnntttttttttttttttttttttttttttttt

SEQ ID NO: 3125 - DNA, 84 bp, Artificial
  Barcode component
  misc_feature (33)..(34): n is a, c, g, or t
  misc_feature (43)..(44): n is a, c, g, or t
  misc_feature (53)..(54): n is a, c, g, or t
tttttttaagcagtggtatcaacgcagagtacnncaattggcnncgtatctcnntttttttttttttttttttttttttttttt

SEQ ID NO: 3126 - DNA, 84 bp, Artificial
  Barcode component
  misc_feature (33)..(34): n is a, c, g, or t
  misc_feature (43)..(44): n is a, c, g, or t
  misc_feature (53)..(54): n is a, c, g, or t
tttttttaagcagtggtatcaacgcagagtacnncaattggcnncctagttcnntttttttttttttttttttttttttttttt

SEQ ID NO: 3127 - DNA, 84 bp, Artificial
  Barcode component
  misc_feature (33)..(34): n is a, c, g, or t
  misc_feature (43)..(44): n is a, c, g, or t
  misc_feature (53)..(54): n is a, c, g, or t
tttttttaagcagtggtatcaacgcagagtacnncaattggcnncaagagtcnntttttttttttttttttttttttttttttt

SEQ ID NO: 3128 - DNA, 84 bp, Artificial
  Barcode component
  misc_feature (33)..(34): n is a, c, g, or t
  misc_feature (43)..(44): n is a, c, g, or t
  misc_feature (53)..(54): n is a, c, g, or t
tttttttaagcagtggtatcaacgcagagtacnntcgaatggnnaatcggcanntttttttttttttttttttttttttttttt

SEQ ID NO: 3129 - DNA, 84 bp, Artificial
  Barcode component
  misc_feature (33)..(34): n is a, c, g, or t
  misc_feature (43)..(44): n is a, c, g, or t
  misc_feature (53)..(54): n is a, c, g, or t
tttttttaagcagtggtatcaacgcagagtacnntcgaatggnntacggcatnntttttttttttttttttttttttttttttt

SEQ ID NO: 3130 - DNA, 84 bp, Artificial
  Barcode component
  misc_feature (33)..(34): n is a, c, g, or t
  misc_feature (43)..(44): n is a, c, g, or t
  misc_feature (53)..(54): n is a, c, g, or t
tttttttaagcagtggtatcaacgcagagtacnntcgaatggnnttggatcgnntttttttttttttttttttttttttttttt

SEQ ID NO: 3131 - DNA, 84 bp, Artificial
  Barcode component
  misc_feature (33)..(34): n is a, c, g, or t
  misc_feature (43)..(44): n is a, c, g, or t
  misc_feature (53)..(54): n is a, c, g, or t
tttttttaagcagtggtatcaacgcagagtacnntcgaatggnntggaacganntttttttttttttttttttttttttttttt

SEQ ID NO: 3132 - DNA, 84 bp, Artificial
  Barcode component
  misc_feature (33)..(34): n is a, c, g, or t
  misc_feature (43)..(44): n is a, c, g, or t
  misc_feature (53)..(54): n is a, c, g, or t
tttttttaagcagtggtatcaacgcagagtacnntcgaatggnnggcaatcanntttttttttttttttttttttttttttttt

SEQ ID NO: 3133 - DNA, 84 bp, Artificial
  Barcode component
  misc_feature (33)..(34): n is a, c, g, or t
  misc_feature (43)..(44): n is a, c, g, or t
  misc_feature (53)..(54): n is a, c, g, or t
tttttttaagcagtggtatcaacgcagagtacnntcgaatggnngaatccganntttttttttttttttttttttttttttttt

SEQ ID NO: 3134 - DNA, 84 bp, Artificial
  Barcode component
  misc_feature (33)..(34): n is a, c, g, or t
  misc_feature (43)..(44): n is a, c, g, or t
  misc_feature (53)..(54): n is a, c, g, or t
tttttttaagcagtggtatcaacgcagagtacnntcgaatggnnttacggtgnntttttttttttttttttttttttttttttt

SEQ ID NO: 3135 - DNA, 84 bp, Artificial
  Barcode component
  misc_feature (33)..(34): n is a, c, g, or t
  misc_feature (43)..(44): n is a, c, g, or t
  misc_feature (53)..(54): n is a, c, g, or t
tttttttaagcagtggtatcaacgcagagtacnntcgaatggnncatatcggnntttttttttttttttttttttttttttttt

SEQ ID NO: 3136 - DNA, 84 bp, Artificial
  Barcode component
  misc_feature (33)..(34): n is a, c, g, or t
  misc_feature (43)..(44): n is a, c, g, or t
  misc_feature (53)..(54): n is a, c, g, or t
tttttttaagcagtggtatcaacgcagagtacnntcgaatggnncttcggtanntttttttttttttttttttttttttttttt

SEQ ID NO: 3137 - DNA, 84 bp, Artificial
  Barcode component
  misc_feature (33)..(34): n is a, c, g, or t
  misc_feature (43)..(44): n is a, c, g, or t
  misc_feature (53)..(54): n is a, c, g, or t
tttttttaagcagtggtatcaacgcagagtacnntcgaatggnntcctaacgnntttttttttttttttttttttttttttttt

SEQ ID NO: 3138 - DNA, 84 bp, Artificial
  Barcode component
  misc_feature (33)..(34): n is a, c, g, or t
  misc_feature (43)..(44): n is a, c, g, or t
  misc_feature (53)..(54): n is a, c, g, or t
tttttttaagcagtggtatcaacgcagagtacnntcgaatggnngtaagccanntttttttttttttttttttttttttttttt

SEQ ID NO: 3139 - DNA, 84 bp, Artificial
  Barcode component
  misc_feature (33)..(34): n is a, c, g, or t
  misc_feature (43)..(44): n is a, c, g, or t
  misc_feature (53)..(54): n is a, c, g, or t
tttttttaagcagtggtatcaacgcagagtacnntcgaatggnntaaggtggnntttttttttttttttttttttttttttttt

SEQ ID NO: 3140 - DNA, 84 bp, Artificial
  Barcode component
  misc_feature (33)..(34): n is a, c, g, or t
  misc_feature (43)..(44): n is a, c, g, or t
  misc_feature (53)..(54): n is a, c, g, or t
tttttttaagcagtggtatcaacgcagagtacnntcgaatggnnggtaagctnntttttttttttttttttttttttttttttt

SEQ ID NO: 3141 - DNA, 84 bp, Artificial
  Barcode component
  misc_feature (33)..(34): n is a, c, g, or t
  misc_feature (43)..(44): n is a, c, g, or t
  misc_feature (53)..(54): n is a, c, g, or t
tttttttaagcagtggtatcaacgcagagtacnntcgaatggnntgtgtcganntttttttttttttttttttttttttttttt

SEQ ID NO: 3142 - DNA, 84 bp, Artificial
  Barcode component
  misc_feature (33)..(34): n is a, c, g, or t
  misc_feature (43)..(44): n is a, c, g, or t
  misc_feature (53)..(54): n is a, c, g, or t
tttttttaagcagtggtatcaacgcagagtacnntcgaatggnngagcatganntttttttttttttttttttttttttttttt

SEQ ID NO: 3143 - DNA, 84 bp, Artificial
  Barcode component
  misc_feature (33)..(34): n is a, c, g, or t
  misc_feature (43)..(44): n is a, c, g, or t
  misc_feature (53)..(54): n is a, c, g, or t
tttttttaagcagtggtatcaacgcagagtacnntcgaatggnntcgaagtcnntttttttttttttttttttttttttttttt

SEQ ID NO: 3144 - DNA, 84 bp, Artificial
  Barcode component
  misc_feature (33)..(34): n is a, c, g, or t
  misc_feature (43)..(44): n is a, c, g, or t
  misc_feature (53)..(54): n is a, c, g, or t
tttttttaagcagtggtatcaacgcagagtacnntcgaatggnnggtgaacanntttttttttttttttttttttttttttttt

SEQ ID NO: 3145 - DNA, 84 bp, Artificial
  Barcode component
  misc_feature (33)..(34): n is a, c, g, or t
  misc_feature (43)..(44): n is a, c, g, or t
  misc_feature (53)..(54): n is a, c, g, or t
tttttttaagcagtggtatcaacgcagagtacnntcgaatggnnacatgcacnntttttttttttttttttttttttttttttt

SEQ ID NO: 3146 - DNA, 84 bp, Artificial
  Barcode component
  misc_feature (33)..(34): n is a, c, g, or t
  misc_feature (43)..(44): n is a, c, g, or t
  misc_feature (53)..(54): n is a, c, g, or t
tttttttaagcagtggtatcaacgcagagtacnntcgaatggnnccaacagtnntttttttttttttttttttttttttttttt

SEQ ID NO: 3147 - DNA, 84 bp, Artificial
  Barcode component
  misc_feature (33)..(34): n is a, c, g, or t
  misc_feature (43)..(44): n is a, c, g, or t
  misc_feature (53)..(54): n is a, c, g, or t
tttttttaagcagtggtatcaacgcagagtacnntcgaatggnnagaacagcnntttttttttttttttttttttttttttttt

SEQ ID NO: 3148 - DNA, 84 bp, Artificial
  Barcode component
  misc_feature (33)..(34): n is a, c, g, or t
  misc_feature (43)..(44): n is a, c, g, or t
  misc_feature (53)..(54): n is a, c, g, or t
tttttttaagcagtggtatcaacgcagagtacnntcgaatggnngaacacgtnntttttttttttttttttttttttttttttt

SEQ ID NO: 3149 - DNA, 84 bp, Artificial
  Barcode component
  misc_feature (33)..(34): n is a, c, g, or t
  misc_feature (43)..(44): n is a, c, g, or t
  misc_feature (53)..(54): n is a, c, g, or t
tttttttaagcagtggtatcaacgcagagtacnntcgaatggnnggtcttcanntttttttttttttttttttttttttttttt

SEQ ID NO: 3150 - DNA, 84 bp, Artificial
  Barcode component
  misc_feature (33)..(34): n is a, c, g, or t
  misc_feature (43)..(44): n is a, c, g, or t
  misc_feature (53)..(54): n is a, c, g, or t
tttttttaagcagtggtatcaacgcagagtacnntcgaatggnnaggttcagnntttttttttttttttttttttttttttttt

SEQ ID NO: 3151 - DNA, 84 bp, Artificial
  Barcode component
  misc_feature (33)..(34): n is a, c, g, or t
  misc_feature (43)..(44): n is a, c, g, or t
  misc_feature (53)..(54): n is a, c, g, or t
tttttttaagcagtggtatcaacgcagagtacnntcgaatggnnctagagcanntttttttttttttttttttttttttttttt

SEQ ID NO: 3152 - DNA, 84 bp, Artificial
  Barcode component
  misc_feature (33)..(34): n is a, c, g, or t
  misc_feature (43)..(44): n is a, c, g, or t
  misc_feature (53)..(54): n is a, c, g, or t
tttttttaagcagtggtatcaacgcagagtacnntcgaatggnncttctagcnntttttttttttttttttttttttttttttt

SEQ ID NO: 3153 - DNA, 84 bp, Artificial
  Barcode component
  misc_feature (33)..(34): n is a, c, g, or t
  misc_feature (43)..(44): n is a, c, g, or t
  misc_feature (53)..(54): n is a, c, g, or t
tttttttaagcagtggtatcaacgcagagtacnntcgaatggnngagtaacgnntttttttttttttttttttttttttttttt

SEQ ID NO: 3154 - DNA, 84 bp, Artificial
  Barcode component
  misc_feature (33)..(34): n is a, c, g, or t
  misc_feature (43)..(44): n is a, c, g, or t
  misc_feature (53)..(54): n is a, c, g, or t
tttttttaagcagtggtatcaacgcagagtacnntcgaatggnnctaagaggnntttttttttttttttttttttttttttttt

SEQ ID NO: 3155 - DNA, 84 bp, Artificial
  Barcode component
  misc_feature (33)..(34): n is a, c, g, or t
  misc_feature (43)..(44): n is a, c, g, or t
  misc_feature (53)..(54): n is a, c, g, or t
tttttttaagcagtggtatcaacgcagagtacnntcgaatggnnacgtgtagnntttttttttttttttttttttttttttttt

SEQ ID NO: 3156 - DNA, 84 bp, Artificial
  Barcode component
  misc_feature (33)..(34): n is a, c, g, or t
  misc_feature (43)..(44): n is a, c, g, or t
  misc_feature (53)..(54): n is a, c, g, or t
tttttttaagcagtggtatcaacgcagagtacnntcgaatggnnactacaggnntttttttttttttttttttttttttttttt

SEQ ID NO: 3157 - DNA, 84 bp, Artificial
  Barcode component
  misc_feature (33)..(34): n is a, c, g, or t
  misc_feature (43)..(44): n is a, c, g, or t
  misc_feature (53)..(54): n is a, c, g, or t
tttttttaagcagtggtatcaacgcagagtacnntcgaatggnntacaggtcnntttttttttttttttttttttttttttttt

SEQ ID NO: 3158 - DNA, 84 bp, Artificial
  Barcode component
  misc_feature (33)..(34): n is a, c, g, or t
  misc_feature (43)..(44): n is a, c, g, or t
  misc_feature (53)..(54): n is a, c, g, or t
tttttttaagcagtggtatcaacgcagagtacnntcgaatggnnctcacatgnntttttttttttttttttttttttttttttt

SEQ ID NO: 3159 - DNA, 84 bp, Artificial
  Barcode component
  misc_feature (33)..(34): n is a, c, g, or t
  misc_feature (43)..(44): n is a, c, g, or t
  misc_feature (53)..(54): n is a, c, g, or t
tttttttaagcagtggtatcaacgcagagtacnntcgaatggnnactaggagnntttttttttttttttttttttttttttttt

SEQ ID NO: 3160 - DNA, 84 bp, Artificial
  Barcode component
  misc_feature (33)..(34): n is a, c, g, or t
  misc_feature (43)..(44): n is a, c, g, or t
  misc_feature (53)..(54): n is a, c, g, or t
tttttttaagcagtggtatcaacgcagagtacnntcgaatggnnccatagganntttttttttttttttttttttttttttttt

SEQ ID NO: 3161 - DNA, 84 bp, Artificial
  Barcode component
  misc_feature (33)..(34): n is a, c, g, or t
  misc_feature (43)..(44): n is a, c, g, or t
  misc_feature (53)..(54): n is a, c, g, or t
tttttttaagcagtggtatcaacgcagagtacnntcgaatggnnggagaatcnntttttttttttttttttttttttttttttt

SEQ ID NO: 3162 - DNA, 84 bp, Artificial
  Barcode component
  misc_feature (33)..(34): n is a, c, g, or t
  misc_feature (43)..(44): n is a, c, g, or t
  misc_feature (53)..(54): n is a, c, g, or t
tttttttaagcagtggtatcaacgcagagtacnntcgaatggnngccaagaanntttttttttttttttttttttttttttttt

SEQ ID NO: 3163 - DNA, 84 bp, Artificial
  Barcode component
  misc_feature (33)..(34): n is a, c, g, or t
  misc_feature (43)..(44): n is a, c, g, or t
  misc_feature (53)..(54): n is a, c, g, or t
tttttttaagcagtggtatcaacgcagagtacnntcgaatggnnaaggcaagnntttttttttttttttttttttttttttttt

SEQ ID NO: 3164 - DNA, 84 bp, Artificial
  Barcode component
  misc_feature (33)..(34): n is a, c, g, or t
  misc_feature (43)..(44): n is a, c, g, or t
  misc_feature (53)..(54): n is a, c, g, or t
tttttttaagcagtggtatcaacgcagagtacnntcgaatggnnaatgtcgcnntttttttttttttttttttttttttttttt

SEQ ID NO: 3165 - DNA, 84 bp, Artificial
  Barcode component
  misc_feature (33)..(34): n is a, c, g, or t
  misc_feature (43)..(44): n is a, c, g, or t
  misc_feature (53)..(54): n is a, c, g, or t
tttttttaagcagtggtatcaacgcagagtacnntcgaatggnnatggaaccnntttttttttttttttttttttttttttttt

SEQ ID NO: 3166 - DNA, 84 bp, Artificial
  Barcode component
  misc_feature (33)..(34): n is a, c, g, or t
  misc_feature (43)..(44): n is a, c, g, or t
  misc_feature (53)..(54): n is a, c, g, or t
tttttttaagcagtggtatcaacgcagagtacnntcgaatggnnagaggcatnntttttttttttttttttttttttttttttt

SEQ ID NO: 3167 - DNA, 84 bp, Artificial
  Barcode component
  misc_feature (33)..(34): n is a, c, g, or t
  misc_feature (43)..(44): n is a, c, g, or t
  misc_feature (53)..(54): n is a, c, g, or t
tttttttaagcagtggtatcaacgcagagtacnntcgaatggnntgcatagcnntttttttttttttttttttttttttttttt

SEQ ID NO: 3168 - DNA, 84 bp, Artificial
  Barcode component
  misc_feature (33)..(34): n is a, c, g, or t
  misc_feature (43)..(44): n is a, c, g, or t
  misc_feature (53)..(54): n is a, c, g, or t
tttttttaagcagtggtatcaacgcagagtacnntcgaatggnnctaacgganntttttttttttttttttttttttttttttt

SEQ ID NO: 3169 - DNA, 84 bp, Artificial
  Barcode component
  misc_feature (33)..(34): n is a, c, g, or t
  misc_feature (43)..(44): n is a, c, g, or t
  misc_feature (53)..(54): n is a, c, g, or t
tttttttaagcagtggtatcaacgcagagtacnntcgaatggnntatcgaggnntttttttttttttttttttttttttttttt

SEQ ID NO: 3170 - DNA, 84 bp, Artificial
  Barcode component
  misc_feature (33)..(34): n is a, c, g, or t
  misc_feature (43)..(44): n is a, c, g, or t
  misc_feature (53)..(54): n is a, c, g, or t
tttttttaagcagtggtatcaacgcagagtacnntcgaatggnncatagcctnntttttttttttttttttttttttttttttt

SEQ ID NO: 3171 - DNA, 84 bp, Artificial
  Barcode component
  misc_feature (33)..(34): n is a, c, g, or t
  misc_feature (43)..(44): n is a, c, g, or t
  misc_feature (53)..(54): n is a, c, g, or t
tttttttaagcagtggtatcaacgcagagtacnntcgaatggnnatcgagacnntttttttttttttttttttttttttttttt

SEQ ID NO: 3172 - DNA, 84 bp, Artificial
  Barcode component
  misc_feature (33)..(34): n is a, c, g, or t
  misc_feature (43)..(44): n is a, c, g, or t
  misc_feature (53)..(54): n is a, c, g, or t
tttttttaagcagtggtatcaacgcagagtacnntcgaatggnnggaagagtnntttttttttttttttttttttttttttttt

SEQ ID NO: 3173 - DNA, 84 bp, Artificial
  Barcode component
  misc_feature (33)..(34): n is a, c, g, or t
  misc_feature (43)..(44): n is a, c, g, or t
  misc_feature (53)..(54): n is a, c, g, or t
tttttttaagcagtggtatcaacgcagagtacnntcgaatggnnccaagtagnntttttttttttttttttttttttttttttt

SEQ ID NO: 3174 - DNA, 84 bp, Artificial
  Barcode component
  misc_feature (33)..(34): n is a, c, g, or t
  misc_feature (43)..(44): n is a, c, g, or t
  misc_feature (53)..(54): n is a, c, g, or t
tttttttaagcagtggtatcaacgcagagtacnntcgaatggnnctgaacagnntttttttttttttttttttttttttttttt

SEQ ID NO: 3175 - DNA, 84 bp, Artificial
  Barcode component
  misc_feature (33)..(34): n is a, c, g, or t
  misc_feature (43)..(44): n is a, c, g, or t
  misc_feature (53)..(54): n is a, c, g, or t
tttttttaagcagtggtatcaacgcagagtacnntcgaatggnngtaggttcnntttttttttttttttttttttttttttttt

SEQ ID NO: 3176 - DNA, 84 bp, Artificial
  Barcode component
  misc_feature (33)..(34): n is a, c, g, or t
  misc_feature (43)..(44): n is a, c, g, or t
  misc_feature (53)..(54): n is a, c, g, or t
tttttttaagcagtggtatcaacgcagagtacnntcgaatggnngtatggacnntttttttttttttttttttttttttttttt

SEQ ID NO: 3177 - DNA, 84 bp, Artificial
  Barcode component
  misc_feature (33)..(34): n is a, c, g, or t
  misc_feature (43)..(44): n is a, c, g, or t
  misc_feature (53)..(54): n is a, c, g, or t
tttttttaagcagtggtatcaacgcagagtacnntcgaatggnntcgcaacanntttttttttttttttttttttttttttttt

SEQ ID NO: 3178 - DNA, 84 bp, Artificial
  Barcode component
  misc_feature (33)..(34): n is a, c, g, or t
  misc_feature (43)..(44): n is a, c, g, or t
  misc_feature (53)..(54): n is a, c, g, or t
tttttttaagcagtggtatcaacgcagagtacnntcgaatggnnccgctaatnntttttttttttttttttttttttttttttt

SEQ ID NO: 3179 - DNA, 84 bp, Artificial
  Barcode component
  misc_feature (33)..(34): n is a, c, g, or t
  misc_feature (43)..(44): n is a, c, g, or t
  misc_feature (53)..(54): n is a, c, g, or t
tttttttaagcagtggtatcaacgcagagtacnntcgaatggnngattcgcanntttttttttttttttttttttttttttttt

SEQ ID NO: 3180 - DNA, 84 bp, Artificial
  Barcode component
  misc_feature (33)..(34): n is a, c, g, or t
  misc_feature (43)..(44): n is a, c, g, or t
  misc_feature (53)..(54): n is a, c, g, or t
tttttttaagcagtggtatcaacgcagagtacnntcgaatggnncgatggaanntttttttttttttttttttttttttttttt

SEQ ID NO: 3181 - DNA, 84 bp, Artificial
  Barcode component
  misc_feature (33)..(34): n is a, c, g, or t
  misc_feature (43)..(44): n is a, c, g, or t
  misc_feature (53)..(54): n is a, c, g, or t
tttttttaagcagtggtatcaacgcagagtacnntcgaatggnnagcaagganntttttttttttttttttttttttttttttt

SEQ ID NO: 3182 - DNA, 84 bp, Artificial
  Barcode component
  misc_feature (33)..(34): n is a, c, g, or t
  misc_feature (43)..(44): n is a, c, g, or t
  misc_feature (53)..(54): n is a, c, g, or t
tttttttaagcagtggtatcaacgcagagtacnntcgaatggnncgtagcaanntttttttttttttttttttttttttttttt

SEQ ID NO: 3183 - DNA, 84 bp, Artificial
  Barcode component
  misc_feature (33)..(34): n is a, c, g, or t
  misc_feature (43)..(44): n is a, c, g, or t
  misc_feature (53)..(54): n is a, c, g, or t
tttttttaagcagtggtatcaacgcagagtacnntcgaatggnntggcagtanntttttttttttttttttttttttttttttt

SEQ ID NO: 3184 - DNA, 84 bp, Artificial
  Barcode component
  misc_feature (33)..(34): n is a, c, g, or t
  misc_feature (43)..(44): n is a, c, g, or t
  misc_feature (53)..(54): n is a, c, g, or t
tttttttaagcagtggtatcaacgcagagtacnntcgaatggnncggtagttnntttttttttttttttttttttttttttttt

SEQ ID NO: 3185 - DNA, 84 bp, Artificial
  Barcode component
  misc_feature (33)..(34): n is a, c, g, or t
  misc_feature (43)..(44): n is a, c, g, or t
  misc_feature (53)..(54): n is a, c, g, or t
tttttttaagcagtggtatcaacgcagagtacnntcgaatggnntgacttcgnntttttttttttttttttttttttttttttt

SEQ ID NO: 3186 - DNA, 84 bp, Artificial
  Barcode component
  misc_feature (33)..(34): n is a, c, g, or t
  misc_feature (43)..(44): n is a, c, g, or t
  misc_feature (53)..(54): n is a, c, g, or t
tttttttaagcagtggtatcaacgcagagtacnntcgaatggnngagtgcaanntttttttttttttttttttttttttttttt

SEQ ID NO: 3187 - DNA, 84 bp, Artificial
  Barcode component
  misc_feature (33)..(34): n is a, c, g, or t
  misc_feature (43)..(44): n is a, c, g, or t
  misc_feature (53)..(54): n is a, c, g, or t
tttttttaagcagtggtatcaacgcagagtacnntcgaatggnnacggtaacnntttttttttttttttttttttttttttttt

SEQ ID NO: 3188 - DNA, 84 bp, Artificial
  Barcode component
  misc_feature (33)..(34): n is a, c, g, or t
  misc_feature (43)..(44): n is a, c, g, or t
  misc_feature (53)..(54): n is a, c, g, or t
tttttttaagcagtggtatcaacgcagagtacnntcgaatggnnaagtggtgnntttttttttttttttttttttttttttttt

SEQ ID NO: 3189 - DNA, 84 bp, Artificial
  Barcode component
  misc_feature (33)..(34): n is a, c, g, or t
  misc_feature (43)..(44): n is a, c, g, or t
  misc_feature (53)..(54): n is a, c, g, or t
tttttttaagcagtggtatcaacgcagagtacnntcgaatggnnggagacaanntttttttttttttttttttttttttttttt

SEQ ID NO: 3190 - DNA, 84 bp, Artificial
  Barcode component
  misc_feature (33)..(34): n is a, c, g, or t
  misc_feature (43)..(44): n is a, c, g, or t
  misc_feature (53)..(54): n is a, c, g, or t
tttttttaagcagtggtatcaacgcagagtacnntcgaatggnntcaaggacnntttttttttttttttttttttttttttttt

SEQ ID NO: 3191 - DNA, 84 bp, Artificial
  Barcode component
  misc_feature (33)..(34): n is a, c, g, or t
  misc_feature (43)..(44): n is a, c, g, or t
  misc_feature (53)..(54): n is a, c, g, or t
tttttttaagcagtggtatcaacgcagagtacnntcgaatggnnaagagagcnntttttttttttttttttttttttttttttt

SEQ ID NO: 3192 - DNA, 84 bp, Artificial
  Barcode component
  misc_feature (33)..(34): n is a, c, g, or t
  misc_feature (43)..(44): n is a, c, g, or t
  misc_feature (53)..(54): n is a, c, g, or t
tttttttaagcagtggtatcaacgcagagtacnntcgaatggnncgagagatnntttttttttttttttttttttttttttttt

SEQ ID NO: 3193 - DNA, 84 bp, Artificial
  Barcode component
  misc_feature (33)..(34): n is a, c, g, or t
  misc_feature (43)..(44): n is a, c, g, or t
  misc_feature (53)..(54): n is a, c, g, or t
tttttttaagcagtggtatcaacgcagagtacnntcgaatggnnacagatggnntttttttttttttttttttttttttttttt

SEQ ID NO: 3194 - DNA, 84 bp, Artificial
  Barcode component
  misc_feature (33)..(34): n is a, c, g, or t
  misc_feature (43)..(44): n is a, c, g, or t
  misc_feature (53)..(54): n is a, c, g, or t
tttttttaagcagtggtatcaacgcagagtacnntcgaatggnnaggagtcanntttttttttttttttttttttttttttttt

SEQ ID NO: 3195 - DNA, 84 bp, Artificial
  Barcode component
  misc_feature (33)..(34): n is a, c, g, or t
  misc_feature (43)..(44): n is a, c, g, or t
  misc_feature (53)..(54): n is a, c, g, or t
tttttttaagcagtggtatcaacgcagagtacnntcgaatggnncgtgttacnntttttttttttttttttttttttttttttt

SEQ ID NO: 3196 - DNA, 84 bp, Artificial
  Barcode component
  misc_feature (33)..(34): n is a, c, g, or t
  misc_feature (43)..(44): n is a, c, g, or t
  misc_feature (53)..(54): n is a, c, g, or t
tttttttaagcagtggtatcaacgcagagtacnntcgaatggnntagtgtgcnntttttttttttttttttttttttttttttt

SEQ ID NO: 3197 - DNA, 84 bp, Artificial
  Barcode component
  misc_feature (33)..(34): n is a, c, g, or t
  misc_feature (43)..(44): n is a, c, g, or t
  misc_feature (53)..(54): n is a, c, g, or t
tttttttaagcagtggtatcaacgcagagtacnntcgaatggnnctcatgacnntttttttttttttttttttttttttttttt

SEQ ID NO: 3198 - DNA, 84 bp, Artificial
  Barcode component
  misc_feature (33)..(34): n is a, c, g, or t
  misc_feature (43)..(44): n is a, c, g, or t
  misc_feature (53)..(54): n is a, c, g, or t
tttttttaagcagtggtatcaacgcagagtacnntcgaatggnngtatccagnntttttttttttttttttttttttttttttt

SEQ ID NO: 3199 - DNA, 84 bp, Artificial
  Barcode component
  misc_feature (33)..(34): n is a, c, g, or t
  misc_feature (43)..(44): n is a, c, g, or t
  misc_feature (53)..(54): n is a, c, g, or t
tttttttaagcagtggtatcaacgcagagtacnntcgaatggnnacgcctatnntttttttttttttttttttttttttttttt

SEQ ID NO: 3200 - DNA, 84 bp, Artificial
  Barcode component
  misc_feature (33)..(34): n is a, c, g, or t
  misc_feature (43)..(44): n is a, c, g, or t
  misc_feature (53)..(54): n is a, c, g, or t
tttttttaagcagtggtatcaacgcagagtacnntcgaatggnnaacgacctnntttttttttttttttttttttttttttttt

SEQ ID NO: 3201 - DNA, 84 bp, Artificial
  Barcode component
  misc_feature (33)..(34): n is a, c, g, or t
  misc_feature (43)..(44): n is a, c, g, or t
  misc_feature (53)..(54): n is a, c, g, or t
tttttttaagcagtggtatcaacgcagagtacnntcgaatggnnatcaggctnntttttttttttttttttttttttttttttt

SEQ ID NO: 3202 - DNA, 84 bp, Artificial
  Barcode component
  misc_feature (33)..(34): n is a, c, g, or t
  misc_feature (43)..(44): n is a, c, g, or t
  misc_feature (53)..(54): n is a, c, g, or t
tttttttaagcagtggtatcaacgcagagtacnntcgaatggnncaagttcgnntttttttttttttttttttttttttttttt

SEQ ID NO: 3203 - DNA, 84 bp, Artificial
  Barcode component
  misc_feature (33)..(34): n is a, c, g, or t
  misc_feature (43)..(44): n is a, c, g, or t
  misc_feature (53)..(54): n is a, c, g, or t
tttttttaagcagtggtatcaacgcagagtacnntcgaatggnntagccaganntttttttttttttttttttttttttttttt

SEQ ID NO: 3204 - DNA, 84 bp, Artificial
  Barcode component
  misc_feature (33)..(34): n is a, c, g, or t
  misc_feature (43)..(44): n is a, c, g, or t
  misc_feature (53)..(54): n is a, c, g, or t
tttttttaagcagtggtatcaacgcagagtacnntcgaatggnncaatcacgnntttttttttttttttttttttttttttttt

SEQ ID NO: 3205 - DNA, 84 bp, Artificial
  Barcode component
  misc_feature (33)..(34): n is a, c, g, or t
  misc_feature (43)..(44): n is a, c, g, or t
  misc_feature (53)..(54): n is a, c, g, or t
tttttttaagcagtggtatcaacgcagagtacnntcgaatggnngcaacaagnntttttttttttttttttttttttttttttt

SEQ ID NO: 3206 - DNA, 84 bp, Artificial
  Barcode component
  misc_feature (33)..(34): n is a, c, g, or t
  misc_feature (43)..(44): n is a, c, g, or t
  misc_feature (53)..(54): n is a, c, g, or t
tttttttaagcagtggtatcaacgcagagtacnntcgaatggnncacgacaanntttttttttttttttttttttttttttttt

SEQ ID NO: 3207 - DNA, 84 bp, Artificial
  Barcode component
  misc_feature (33)..(34): n is a, c, g, or t
  misc_feature (43)..(44): n is a, c, g, or t
  misc_feature (53)..(54): n is a, c, g, or t
tttttttaagcagtggtatcaacgcagagtacnntcgaatggnntacggaganntttttttttttttttttttttttttttttt

SEQ ID NO: 3208 - DNA, 84 bp, Artificial
  Barcode component
  misc_feature (33)..(34): n is a, c, g, or t
  misc_feature (43)..(44): n is a, c, g, or t
  misc_feature (53)..(54): n is a, c, g, or t
tttttttaagcagtggtatcaacgcagagtacnntcgaatggnncgacaaganntttttttttttttttttttttttttttttt

SEQ ID NO: 3209 - DNA, 84 bp, Artificial
  Barcode component
  misc_feature (33)..(34): n is a, c, g, or t
  misc_feature (43)..(44): n is a, c, g, or t
  misc_feature (53)..(54): n is a, c, g, or t
tttttttaagcagtggtatcaacgcagagtacnntcgaatggnncgaagtganntttttttttttttttttttttttttttttt

SEQ ID NO: 3210 - DNA, 84 bp, Artificial
  Barcode component
  misc_feature (33)..(34): n is a, c, g, or t
  misc_feature (43)..(44): n is a, c, g, or t
  misc_feature (53)..(54): n is a, c, g, or t
tttttttaagcagtggtatcaacgcagagtacnntcgaatggnnagctggtanntttttttttttttttttttttttttttttt

SEQ ID NO: 3211 - DNA, 84 bp, Artificial
  Barcode component
  misc_feature (33)..(34): n is a, c, g, or t
  misc_feature (43)..(44): n is a, c, g, or t
  misc_feature (53)..(54): n is a, c, g, or t
tttttttaagcagtggtatcaacgcagagtacnntcgaatggnnaactaggcnntttttttttttttttttttttttttttttt

SEQ ID NO: 3212 - DNA, 84 bp, Artificial
  Barcode component
  misc_feature (33)..(34): n is a, c, g, or t
  misc_feature (43)..(44): n is a, c, g, or t
  misc_feature (53)..(54): n is a, c, g, or t
tttttttaagcagtggtatcaacgcagagtacnntcgaatggnncagcaagtnntttttttttttttttttttttttttttttt

SEQ ID NO: 3213 - DNA, 84 bp, Artificial
  Barcode component
  misc_feature (33)..(34): n is a, c, g, or t
  misc_feature (43)..(44): n is a, c, g, or t
  misc_feature (53)..(54): n is a, c, g, or t
tttttttaagcagtggtatcaacgcagagtacnntcgaatggnnacgaggtanntttttttttttttttttttttttttttttt

SEQ ID NO: 3214 - DNA, 84 bp, Artificial
  Barcode component
  misc_feature (33)..(34): n is a, c, g, or t
  misc_feature (43)..(44): n is a, c, g, or t
  misc_feature (53)..(54): n is a, c, g, or t
tttttttaagcagtggtatcaacgcagagtacnntcgaatggnncatcttccnntttttttttttttttttttttttttttttt

SEQ ID NO: 3215 - DNA, 84 bp, Artificial
  Barcode component
  misc_feature (33)..(34): n is a, c, g, or t
  misc_feature (43)..(44): n is a, c, g, or t
  misc_feature (53)..(54): n is a, c, g, or t
tttttttaagcagtggtatcaacgcagagtacnntcgaatggnncctgaatcnntttttttttttttttttttttttttttttt

SEQ ID NO: 3216 - DNA, 84 bp, Artificial
  Barcode component
  misc_feature (33)..(34): n is a, c, g, or t
  misc_feature (43)..(44): n is a, c, g, or t
  misc_feature (53)..(54): n is a, c, g, or t
tttttttaagcagtggtatcaacgcagagtacnntcgaatggnntgcagactnntttttttttttttttttttttttttttttt

SEQ ID NO: 3217 - DNA, 84 bp, Artificial
  Barcode component
  misc_feature (33)..(34): n is a, c, g, or t
  misc_feature (43)..(44): n is a, c, g, or t
  misc_feature (53)..(54): n is a, c, g, or t
tttttttaagcagtggtatcaacgcagagtacnntcgaatggnnagatgtggnntttttttttttttttttttttttttttttt

SEQ ID NO: 3218 - DNA, 84 bp, Artificial
  Barcode component
  misc_feature (33)..(34): n is a, c, g, or t
  misc_feature (43)..(44): n is a, c, g, or t
  misc_feature (53)..(54): n is a, c, g, or t
tttttttaagcagtggtatcaacgcagagtacnntcgaatggnnagttcgacnntttttttttttttttttttttttttttttt

SEQ ID NO: 3219 - DNA, 84 bp, Artificial
  Barcode component
  misc_feature (33)..(34): n is a, c, g, or t
  misc_feature (43)..(44): n is a, c, g, or t
  misc_feature (53)..(54): n is a, c, g, or t
tttttttaagcagtggtatcaacgcagagtacnntcgaatggnnacaacctcnntttttttttttttttttttttttttttttt

SEQ ID NO: 3220 - DNA, 84 bp, Artificial
  Barcode component
  misc_feature (33)..(34): n is a, c, g, or t
  misc_feature (43)..(44): n is a, c, g, or t
  misc_feature (53)..(54): n is a, c, g, or t
tttttttaagcagtggtatcaacgcagagtacnntcgaatggnncatggtagnntttttttttttttttttttttttttttttt

SEQ ID NO: 3221 - DNA, 84 bp, Artificial
  Barcode component
  misc_feature (33)..(34): n is a, c, g, or t
  misc_feature (43)..(44): n is a, c, g, or t
  misc_feature (53)..(54): n is a, c, g, or t
tttttttaagcagtggtatcaacgcagagtacnntcgaatggnncgtatctcnntttttttttttttttttttttttttttttt

SEQ ID NO: 3222 - DNA, 84 bp, Artificial
  Barcode component
  misc_feature (33)..(34): n is a, c, g, or t
  misc_feature (43)..(44): n is a, c, g, or t
  misc_feature (53)..(54): n is a, c, g, or t
tttttttaagcagtggtatcaacgcagagtacnntcgaatggnncctagttcnntttttttttttttttttttttttttttttt

SEQ ID NO: 3223 - DNA, 84 bp, Artificial
  Barcode component
  misc_feature (33)..(34): n is a, c, g, or t
  misc_feature (43)..(44): n is a, c, g, or t
  misc_feature (53)..(54): n is a, c, g, or t
tttttttaagcagtggtatcaacgcagagtacnntcgaatggnncaagagtcnntttttttttttttttttttttttttttttt

SEQ ID NO: 3224 - DNA, 84 bp, Artificial
  Barcode component
  misc_feature (33)..(34): n is a, c, g, or t
  misc_feature (43)..(44): n is a, c, g, or t
  misc_feature (53)..(54): n is a, c, g, or t
tttttttaagcagtggtatcaacgcagagtacnnaaggtgcannaatcggcanntttttttttttttttttttttttttttttt

SEQ ID NO: 3225 - DNA, 84 bp, Artificial
  Barcode component
  misc_feature (33)..(34): n is a, c, g, or t
  misc_feature (43)..(44): n is a, c, g, or t
  misc_feature (53)..(54): n is a, c, g, or t
tttttttaagcagtggtatcaacgcagagtacnnaaggtgcanntacggcatnntttttttttttttttttttttttttttttt

SEQ ID NO: 3226 - DNA, 84 bp, Artificial
  Barcode component
  misc_feature (33)..(34): n is a, c, g, or t
  misc_feature (43)..(44): n is a, c, g, or t
  misc_feature (53)..(54): n is a, c, g, or t
tttttttaagcagtggtatcaacgcagagtacnnaaggtgcannttggatcgnntttttttttttttttttttttttttttttt

SEQ ID NO: 3227 - DNA, 84 bp, Artificial
  Barcode component
  misc_feature (33)..(34): n is a, c, g, or t
  misc_feature (43)..(44): n is a, c, g, or t
  misc_feature (53)..(54): n is a, c, g, or t
tttttttaagcagtggtatcaacgcagagtacnnaaggtgcanntggaacganntttttttttttttttttttttttttttttt

SEQ ID NO: 3228 - DNA, 84 bp, Artificial
  Barcode component
  misc_feature (33)..(34): n is a, c, g, or t
  misc_feature (43)..(44): n is a, c, g, or t
  misc_feature (53)..(54): n is a, c, g, or t
tttttttaagcagtggtatcaacgcagagtacnnaaggtgcannggcaatcanntttttttttttttttttttttttttttttt

SEQ ID NO: 3229 - DNA, 84 bp, Artificial
  Barcode component
  misc_feature (33)..(34): n is a, c, g, or t
  misc_feature (43)..(44): n is a, c, g, or t
  misc_feature (53)..(54): n is a, c, g, or t
tttttttaagcagtggtatcaacgcagagtacnnaaggtgcanngaatccganntttttttttttttttttttttttttttttt

SEQ ID NO: 3230 - DNA, 84 bp, Artificial
  Barcode component
  misc_feature (33)..(34): n is a, c, g, or t
  misc_feature (43)..(44): n is a, c, g, or t
  misc_feature (53)..(54): n is a, c, g, or t
tttttttaagcagtggtatcaacgcagagtacnnaaggtgcannttacggtgnntttttttttttttttttttttttttttttt

SEQ ID NO: 3231 - DNA, 84 bp, Artificial
  Barcode component
  misc_feature (33)..(34): n is a, c, g, or t
  misc_feature (43)..(44): n is a, c, g, or t
  misc_feature (53)..(54): n is a, c, g, or t
tttttttaagcagtggtatcaacgcagagtacnnaaggtgcanncatatcggnntttttttttttttttttttttttttttttt

SEQ ID NO: 3232 - DNA, 84 bp, Artificial
  Barcode component
  misc_feature (33)..(34): n is a, c, g, or t
  misc_feature (43)..(44): n is a, c, g, or t
  misc_feature (53)..(54): n is a, c, g, or t
tttttttaagcagtggtatcaacgcagagtacnnaaggtgcanncttcggtanntttttttttttttttttttttttttttttt

SEQ ID NO: 3233 - DNA, 84 bp, Artificial
  Barcode component
  misc_feature (33)..(34): n is a, c, g, or t
  misc_feature (43)..(44): n is a, c, g, or t
  misc_feature (53)..(54): n is a, c, g, or t
tttttttaagcagtggtatcaacgcagagtacnnaaggtgcanntcctaacgnntttttttttttttttttttttttttttttt

SEQ ID NO: 3234 - DNA, 84 bp, Artificial
  Barcode component
  misc_feature (33)..(34): n is a, c, g, or t
  misc_feature (43)..(44): n is a, c, g, or t
  misc_feature (53)..(54): n is a, c, g, or t
tttttttaagcagtggtatcaacgcagagtacnnaaggtgcanngtaagccanntttttttttttttttttttttttttttttt

SEQ ID NO: 3235 - DNA, 84 bp, Artificial
  Barcode component
  misc_feature (33)..(34): n is a, c, g, or t
  misc_feature (43)..(44): n is a, c, g, or t
  misc_feature (53)..(54): n is a, c, g, or t
tttttttaagcagtggtatcaacgcagagtacnnaaggtgcanntaaggtggnntttttttttttttttttttttttttttttt

SEQ ID NO: 3236 - DNA, 84 bp, Artificial
  Barcode component
  misc_feature (33)..(34): n is a, c, g, or t
  misc_feature (43)..(44): n is a, c, g, or t
  misc_feature (53)..(54): n is a, c, g, or t
tttttttaagcagtggtatcaacgcagagtacnnaaggtgcannggtaagctnntttttttttttttttttttttttttttttt

SEQ ID NO: 3237 - DNA, 84 bp, Artificial
  Barcode component
  misc_feature (33)..(34): n is a, c, g, or t
  misc_feature (43)..(44): n is a, c, g, or t
  misc_feature (53)..(54): n is a, c, g, or t
tttttttaagcagtggtatcaacgcagagtacnnaaggtgcanntgtgtcganntttttttttttttttttttttttttttttt

SEQ ID NO: 3238 - DNA, 84 bp, Artificial
  Barcode component
  misc_feature (33)..(34): n is a, c, g, or t
  misc_feature (43)..(44): n is a, c, g, or t
  misc_feature (53)..(54): n is a, c, g, or t
tttttttaagcagtggtatcaacgcagagtacnnaaggtgcanngagcatganntttttttttttttttttttttttttttttt

SEQ ID NO: 3239 - DNA, 84 bp, Artificial
  Barcode component
  misc_feature (33)..(34): n is a, c, g, or t
  misc_feature (43)..(44): n is a, c, g, or t
  misc_feature (53)..(54): n is a, c, g, or t
tttttttaagcagtggtatcaacgcagagtacnnaaggtgcanntcgaagtcnntttttttttttttttttttttttttttttt

SEQ ID NO: 3240 - DNA, 84 bp, Artificial
  Barcode component
  misc_feature (33)..(34): n is a, c, g, or t
  misc_feature (43)..(44): n is a, c, g, or t
  misc_feature (53)..(54): n is a, c, g, or t
tttttttaagcagtggtatcaacgcagagtacnnaaggtgcannggtgaacanntttttttttttttttttttttttttttttt

SEQ ID NO: 3241 - DNA, 84 bp, Artificial
  Barcode component
  misc_feature (33)..(34): n is a, c, g, or t
  misc_feature (43)..(44): n is a, c, g, or t
  misc_feature (53)..(54): n is a, c, g, or t
tttttttaagcagtggtatcaacgcagagtacnnaaggtgcannacatgcacnntttttttttttttttttttttttttttttt

SEQ ID NO: 3242 - DNA, 84 bp, Artificial
  Barcode component
  misc_feature (33)..(34): n is a, c, g, or t
  misc_feature (43)..(44): n is a, c, g, or t
  misc_feature (53)..(54): n is a, c, g, or t
tttttttaagcagtggtatcaacgcagagtacnnaaggtgcannccaacagtnntttttttttttttttttttttttttttttt

SEQ ID NO: 3243 - DNA, 84 bp, Artificial
  Barcode component
  misc_feature (33)..(34): n is a, c, g, or t
  misc_feature (43)..(44): n is a, c, g, or t
  misc_feature (53)..(54): n is a, c, g, or t
tttttttaagcagtggtatcaacgcagagtacnnaaggtgcannagaacagcnntttttttttttttttttttttttttttttt

SEQ ID NO: 3244 - DNA, 84 bp, Artificial
  Barcode component
  misc_feature (33)..(34): n is a, c, g, or t
  misc_feature (43)..(44): n is a, c, g, or t
  misc_feature (53)..(54): n is a, c, g, or t
tttttttaagcagtggtatcaacgcagagtacnnaaggtgcanngaacacgtnntttttttttttttttttttttttttttttt

SEQ ID NO: 3245 - DNA, 84 bp, Artificial
  Barcode component
  misc_feature (33)..(34): n is a, c, g, or t
  misc_feature (43)..(44): n is a, c, g, or t
  misc_feature (53)..(54): n is a, c, g, or t
tttttttaagcagtggtatcaacgcagagtacnnaaggtgcannggtcttcanntttttttttttttttttttttttttttttt

SEQ ID NO: 3246 - DNA, 84 bp, Artificial
  Barcode component
  misc_feature (33)..(34): n is a, c, g, or t
  misc_feature (43)..(44): n is a, c, g, or t
  misc_feature (53)..(54): n is a, c, g, or t
tttttttaagcagtggtatcaacgcagagtacnnaaggtgcannaggttcagnntttttttttttttttttttttttttttttt

SEQ ID NO: 3247 - DNA, 84 bp, Artificial
  Barcode component
  misc_feature (33)..(34): n is a, c, g, or t
  misc_feature (43)..(44): n is a, c, g, or t
  misc_feature (53)..(54): n is a, c, g, or t
tttttttaagcagtggtatcaacgcagagtacnnaaggtgcannctagagcanntttttttttttttttttttttttttttttt

SEQ ID NO: 3248 - DNA, 84 bp, Artificial
  Barcode component
  misc_feature (33)..(34): n is a, c, g, or t
  misc_feature (43)..(44): n is a, c, g, or t
  misc_feature (53)..(54): n is a, c, g, or t
tttttttaagcagtggtatcaacgcagagtacnnaaggtgcanncttctagcnntttttttttttttttttttttttttttttt

SEQ ID NO: 3249 - DNA, 84 bp, Artificial
  Barcode component
  misc_feature (33)..(34): n is a, c, g, or t
  misc_feature (43)..(44): n is a, c, g, or t
  misc_feature (53)..(54): n is a, c, g, or t
tttttttaagcagtggtatcaacgcagagtacnnaaggtgcanngagtaacgnntttttttttttttttttttttttttttttt

SEQ ID NO: 3250 - DNA, 84 bp, Artificial
  Barcode component
  misc_feature (33)..(34): n is a, c, g, or t
  misc_feature (43)..(44): n is a, c, g, or t
  misc_feature (53)..(54): n is a, c, g, or t
tttttttaagcagtggtatcaacgcagagtacnnaaggtgcannctaagaggnntttttttttttttttttttttttttttttt

SEQ ID NO: 3251 - DNA, 84 bp, Artificial
  Barcode component
  misc_feature (33)..(34): n is a, c, g, or t
  misc_feature (43)..(44): n is a, c, g, or t
  misc_feature (53)..(54): n is a, c, g, or t
tttttttaagcagtggtatcaacgcagagtacnnaaggtgcannacgtgtagnntttttttttttttttttttttttttttttt

SEQ ID NO: 3252 - DNA, 84 bp, Artificial
  Barcode component
  misc_feature (33)..(34): n is a, c, g, or t
  misc_feature (43)..(44): n is a, c, g, or t
  misc_feature (53)..(54): n is a, c, g, or t
tttttttaagcagtggtatcaacgcagagtacnnaaggtgcannactacaggnntttttttttttttttttttttttttttttt

SEQ ID NO: 3253 - DNA, 84 bp, Artificial
  Barcode component
  misc_feature (33)..(34): n is a, c, g, or t
  misc_feature (43)..(44): n is a, c, g, or t
  misc_feature (53)..(54): n is a, c, g, or t
tttttttaagcagtggtatcaacgcagagtacnnaaggtgcanntacaggtcnntttttttttttttttttttttttttttttt

SEQ ID NO: 3254 - DNA, 84 bp, Artificial
  Barcode component
  misc_feature (33)..(34): n is a, c, g, or t
  misc_feature (43)..(44): n is a, c, g, or t
  misc_feature (53)..(54): n is a, c, g, or t
tttttttaagcagtggtatcaacgcagagtacnnaaggtgcannctcacatgnntttttttttttttttttttttttttttttt

SEQ ID NO: 3255 - DNA, 84 bp, Artificial
  Barcode component
  misc_feature (33)..(34): n is a, c, g, or t
  misc_feature (43)..(44): n is a, c, g, or t
  misc_feature (53)..(54): n is a, c, g, or t
tttttttaagcagtggtatcaacgcagagtacnnaaggtgcannactaggagnntttttttttttttttttttttttttttttt

SEQ ID NO: 3256 - DNA, 84 bp, Artificial
  Barcode component
  misc_feature (33)..(34): n is a, c, g, or t
  misc_feature (43)..(44): n is a, c, g, or t
  misc_feature (53)..(54): n is a, c, g, or t
tttttttaagcagtggtatcaacgcagagtacnnaaggtgcannccatagganntttttttttttttttttttttttttttttt

SEQ ID NO: 3257 - DNA, 84 bp, Artificial
  Barcode component
  misc_feature (33)..(34): n is a, c, g, or t
  misc_feature (43)..(44): n is a, c, g, or t
  misc_feature (53)..(54): n is a, c, g, or t
tttttttaagcagtggtatcaacgcagagtacnnaaggtgcannggagaatcnntttttttttttttttttttttttttttttt

SEQ ID NO: 3258 - DNA, 84 bp, Artificial
  Barcode component
  misc_feature (33)..(34): n is a, c, g, or t
  misc_feature (43)..(44): n is a, c, g, or t
  misc_feature (53)..(54): n is a, c, g, or t
tttttttaagcagtggtatcaacgcagagtacnnaaggtgcanngccaagaanntttttttttttttttttttttttttttttt

SEQ ID NO: 3259 - DNA, 84 bp, Artificial
  Barcode component
  misc_feature (33)..(34): n is a, c, g, or t
  misc_feature (43)..(44): n is a, c, g, or t
  misc_feature (53)..(54): n is a, c, g, or t
tttttttaagcagtggtatcaacgcagagtacnnaaggtgcannaaggcaagnntttttttttttttttttttttttttttttt

SEQ ID NO: 3260 - DNA, 84 bp, Artificial
  Barcode component
  misc_feature (33)..(34): n is a, c, g, or t
  misc_feature (43)..(44): n is a, c, g, or t
  misc_feature (53)..(54): n is a, c, g, or t
tttttttaagcagtggtatcaacgcagagtacnnaaggtgcannaatgtcgcnntttttttttttttttttttttttttttttt

SEQ ID NO: 3261 - DNA, 84 bp, Artificial
  Barcode component
  misc_feature (33)..(34): n is a, c, g, or t
  misc_feature (43)..(44): n is a, c, g, or t
  misc_feature (53)..(54): n is a, c, g, or t
tttttttaagcagtggtatcaacgcagagtacnnaaggtgcannatggaaccnntttttttttttttttttttttttttttttt

SEQ ID NO: 3262 - DNA, 84 bp, Artificial
  Barcode component
  misc_feature (33)..(34): n is a, c, g, or t
  misc_feature (43)..(44): n is a, c, g, or t
  misc_feature (53)..(54): n is a, c, g, or t
tttttttaagcagtggtatcaacgcagagtacnnaaggtgcannagaggcatnntttttttttttttttttttttttttttttt

SEQ ID NO: 3263 - DNA, 84 bp, Artificial
  Barcode component
  misc_feature (33)..(34): n is a, c, g, or t
  misc_feature (43)..(44): n is a, c, g, or t
  misc_feature (53)..(54): n is a, c, g, or t
tttttttaagcagtggtatcaacgcagagtacnnaaggtgcanntgcatagcnntttttttttttttttttttttttttttttt

SEQ ID NO: 3264 - DNA, 84 bp, Artificial
  Barcode component
  misc_feature (33)..(34): n is a, c, g, or t
  misc_feature (43)..(44): n is a, c, g, or t
  misc_feature (53)..(54): n is a, c, g, or t
tttttttaagcagtggtatcaacgcagagtacnnaaggtgcannctaacgganntttttttttttttttttttttttttttttt

SEQ ID NO: 3265 - DNA, 84 bp, Artificial
  Barcode component
  misc_feature (33)..(34): n is a, c, g, or t
  misc_feature (43)..(44): n is a, c, g, or t
  misc_feature (53)..(54): n is a, c, g, or t
tttttttaagcagtggtatcaacgcagagtacnnaaggtgcanntatcgaggnntttttttttttttttttttttttttttttt

SEQ ID NO: 3266 - DNA, 84 bp, Artificial
  Barcode component
  misc_feature (33)..(34): n is a, c, g, or t
  misc_feature (43)..(44): n is a, c, g, or t
  misc_feature (53)..(54): n is a, c, g, or t
tttttttaagcagtggtatcaacgcagagtacnnaaggtgcanncatagcctnntttttttttttttttttttttttttttttt

SEQ ID NO: 3267 - DNA, 84 bp, Artificial
  Barcode component
  misc_feature (33)..(34): n is a, c, g, or t
  misc_feature (43)..(44): n is a, c, g, or t
  misc_feature (53)..(54): n is a, c, g, or t
tttttttaagcagtggtatcaacgcagagtacnnaaggtgcannatcgagacnntttttttttttttttttttttttttttttt

SEQ ID NO: 3268 - DNA, 84 bp, Artificial
  Barcode component
  misc_feature (33)..(34): n is a, c, g, or t
  misc_feature (43)..(44): n is a, c, g, or t
  misc_feature (53)..(54): n is a, c, g, or t
tttttttaagcagtggtatcaacgcagagtacnnaaggtgcannggaagagtnntttttttttttttttttttttttttttttt

SEQ ID NO: 3269 - DNA, 84 bp, Artificial
  Barcode component
  misc_feature (33)..(34): n is a, c, g, or t
  misc_feature (43)..(44): n is a, c, g, or t
  misc_feature (53)..(54): n is a, c, g, or t
tttttttaagcagtggtatcaacgcagagtacnnaaggtgcannccaagtagnntttttttttttttttttttttttttttttt

SEQ ID NO: 3270 - DNA, 84 bp, Artificial
  Barcode component
  misc_feature (33)..(34): n is a, c, g, or t
  misc_feature (43)..(44): n is a, c, g, or t
  misc_feature (53)..(54): n is a, c, g, or t
tttttttaagcagtggtatcaacgcagagtacnnaaggtgcannctgaacagnntttttttttttttttttttttttttttttt

SEQ ID NO: 3271 - DNA, 84 bp, Artificial
  Barcode component
  misc_feature (33)..(34): n is a, c, g, or t
  misc_feature (43)..(44): n is a, c, g, or t
  misc_feature (53)..(54): n is a, c, g, or t
tttttttaagcagtggtatcaacgcagagtacnnaaggtgcanngtaggttcnntttttttttttttttttttttttttttttt

SEQ ID NO: 3272 - DNA, 84 bp, Artificial
  Barcode component
  misc_feature (33)..(34): n is a, c, g, or t
  misc_feature (43)..(44): n is a, c, g, or t
  misc_feature (53)..(54): n is a, c, g, or t
tttttttaagcagtggtatcaacgcagagtacnnaaggtgcanngtatggacnntttttttttttttttttttttttttttttt

SEQ ID NO: 3273 - DNA, 84 bp, Artificial
  Barcode component
  misc_feature (33)..(34): n is a, c, g, or t
  misc_feature (43)..(44): n is a, c, g, or t
  misc_feature (53)..(54): n is a, c, g, or t
tttttttaagcagtggtatcaacgcagagtacnnaaggtgcanntcgcaacanntttttttttttttttttttttttttttttt

SEQ ID NO: 3274 - DNA, 84 bp, Artificial
  Barcode component
  misc_feature (33)..(34): n is a, c, g, or t
  misc_feature (43)..(44): n is a, c, g, or t
  misc_feature (53)..(54): n is a, c, g, or t
tttttttaagcagtggtatcaacgcagagtacnnaaggtgcannccgctaatnntttttttttttttttttttttttttttttt

SEQ ID NO: 3275 - DNA, 84 bp, Artificial
  Barcode component
  misc_feature (33)..(34): n is a, c, g, or t
  misc_feature (43)..(44): n is a, c, g, or t
  misc_feature (53)..(54): n is a, c, g, or t
tttttttaagcagtggtatcaacgcagagtacnnaaggtgcanngattcgcanntttttttttttttttttttttttttttttt

SEQ ID NO: 3276 - DNA, 84 bp, Artificial
  Barcode component
  misc_feature (33)..(34): n is a, c, g, or t
  misc_feature (43)..(44): n is a, c, g, or t
  misc_feature (53)..(54): n is a, c, g, or t
tttttttaagcagtggtatcaacgcagagtacnnaaggtgcanncgatggaanntttttttttttttttttttttttttttttt

SEQ ID NO: 3277 - DNA, 84 bp, Artificial
  Barcode component
  misc_feature (33)..(34): n is a, c, g, or t
  misc_feature (43)..(44): n is a, c, g, or t
  misc_feature (53)..(54): n is a, c, g, or t
tttttttaagcagtggtatcaacgcagagtacnnaaggtgcannagcaagganntttttttttttttttttttttttttttttt

SEQ ID NO: 3278 - DNA, 84 bp, Artificial
  Barcode component
  misc_feature (33)..(34): n is a, c, g, or t
  misc_feature (43)..(44): n is a, c, g, or t
  misc_feature (53)..(54): n is a, c, g, or t
tttttttaagcagtggtatcaacgcagagtacnnaaggtgcanncgtagcaanntttttttttttttttttttttttttttttt

SEQ ID NO: 3279 - DNA, 84 bp, Artificial
  Barcode component
  misc_feature (33)..(34): n is a, c, g, or t
  misc_feature (43)..(44): n is a, c, g, or t
  misc_feature (53)..(54): n is a, c, g, or t
tttttttaagcagtggtatcaacgcagagtacnnaaggtgcanntggcagtanntttttttttttttttttttttttttttttt

SEQ ID NO: 3280 - DNA, 84 bp, Artificial
  Barcode component
  misc_feature (33)..(34): n is a, c, g, or t
  misc_feature (43)..(44): n is a, c, g, or t
  misc_feature (53)..(54): n is a, c, g, or t
tttttttaagcagtggtatcaacgcagagtacnnaaggtgcanncggtagttnntttttttttttttttttttttttttttttt

SEQ ID NO: 3281 - DNA, 84 bp, Artificial
  Barcode component
  misc_feature (33)..(34): n is a, c, g, or t
  misc_feature (43)..(44): n is a, c, g, or t
  misc_feature (53)..(54): n is a, c, g, or t
tttttttaagcagtggtatcaacgcagagtacnnaaggtgcanntgacttcgnntttttttttttttttttttttttttttttt

SEQ ID NO: 3282 - DNA, 84 bp, Artificial
  Barcode component
  misc_feature (33)..(34): n is a, c, g, or t
  misc_feature (43)..(44): n is a, c, g, or t
  misc_feature (53)..(54): n is a, c, g, or t
tttttttaagcagtggtatcaacgcagagtacnnaaggtgcanngagtgcaanntttttttttttttttttttttttttttttt

SEQ ID NO: 3283 - DNA, 84 bp, Artificial
  Barcode component
  misc_feature (33)..(34): n is a, c, g, or t
  misc_feature (43)..(44): n is a, c, g, or t
  misc_feature (53)..(54): n is a, c, g, or t
tttttttaagcagtggtatcaacgcagagtacnnaaggtgcannacggtaacnntttttttttttttttttttttttttttttt

SEQ ID NO: 3284 - DNA, 84 bp, Artificial
  Barcode component
  misc_feature (33)..(34): n is a, c, g, or t
  misc_feature (43)..(44): n is a, c, g, or t
  misc_feature (53)..(54): n is a, c, g, or t
tttttttaagcagtggtatcaacgcagagtacnnaaggtgcannaagtggtgnntttttttttttttttttttttttttttttt

SEQ ID NO: 3285 - DNA, 84 bp, Artificial
  Barcode component
  misc_feature (33)..(34): n is a, c, g, or t
  misc_feature (43)..(44): n is a, c, g, or t
  misc_feature (53)..(54): n is a, c, g, or t
tttttttaagcagtggtatcaacgcagagtacnnaaggtgcannggagacaanntttttttttttttttttttttttttttttt

SEQ ID NO: 3286 - DNA, 84 bp, Artificial
  Barcode component
  misc_feature (33)..(34): n is a, c, g, or t
  misc_feature (43)..(44): n is a, c, g, or t
  misc_feature (53)..(54): n is a, c, g, or t
tttttttaagcagtggtatcaacgcagagtacnnaaggtgcanntcaaggacnntttttttttttttttttttttttttttttt

SEQ ID NO: 3287 - DNA, 84 bp, Artificial
  Barcode component
  misc_feature (33)..(34): n is a, c, g, or t
  misc_feature (43)..(44): n is a, c, g, or t
  misc_feature (53)..(54): n is a, c, g, or t
tttttttaagcagtggtatcaacgcagagtacnnaaggtgcannaagagagcnntttttttttttttttttttttttttttttt

SEQ ID NO: 3288 - DNA, 84 bp, Artificial
  Barcode component
  misc_feature (33)..(34): n is a, c, g, or t
  misc_feature (43)..(44): n is a, c, g, or t
  misc_feature (53)..(54): n is a, c, g, or t
tttttttaagcagtggtatcaacgcagagtacnnaaggtgcanncgagagatnntttttttttttttttttttttttttttttt

SEQ ID NO: 3289 - DNA, 84 bp, Artificial
  Barcode component
  misc_feature (33)..(34): n is a, c, g, or t
  misc_feature (43)..(44): n is a, c, g, or t
  misc_feature (53)..(54): n is a, c, g, or t
tttttttaagcagtggtatcaacgcagagtacnnaaggtgcannacagatggnntttttttttttttttttttttttttttttt

SEQ ID NO: 3290 - DNA, 84 bp, Artificial
  Barcode component
  misc_feature (33)..(34): n is a, c, g, or t
  misc_feature (43)..(44): n is a, c, g, or t
  misc_feature (53)..(54): n is a, c, g, or t
tttttttaagcagtggtatcaacgcagagtacnnaaggtgcannaggagtcanntttttttttttttttttttttttttttttt

SEQ ID NO: 3291 - DNA, 84 bp, Artificial
  Barcode component
  misc_feature (33)..(34): n is a, c, g, or t
  misc_feature (43)..(44): n is a, c, g, or t
  misc_feature (53)..(54): n is a, c, g, or t
tttttttaagcagtggtatcaacgcagagtacnnaaggtgcanncgtgttacnntttttttttttttttttttttttttttttt

SEQ ID NO: 3292 - DNA, 84 bp, Artificial
  Barcode component
  misc_feature (33)..(34): n is a, c, g, or t
  misc_feature (43)..(44): n is a, c, g, or t
  misc_feature (53)..(54): n is a, c, g, or t
tttttttaagcagtggtatcaacgcagagtacnnaaggtgcanntagtgtgcnntttttttttttttttttttttttttttttt

SEQ ID NO: 3293 - DNA, 84 bp, Artificial
  Barcode component
  misc_feature (33)..(34): n is a, c, g, or t
  misc_feature (43)..(44): n is a, c, g, or t
  misc_feature (53)..(54): n is a, c, g, or t
tttttttaagcagtggtatcaacgcagagtacnnaaggtgcannctcatgacnntttttttttttttttttttttttttttttt

SEQ ID NO: 3294 - DNA, 84 bp, Artificial
  Barcode component
  misc_feature (33)..(34): n is a, c, g, or t
  misc_feature (43)..(44): n is a, c, g, or t
  misc_feature (53)..(54): n is a, c, g, or t
tttttttaagcagtggtatcaacgcagagtacnnaaggtgcanngtatccagnntttttttttttttttttttttttttttttt

SEQ ID NO: 3295 - DNA, 84 bp, Artificial
  Barcode component
  misc_feature (33)..(34): n is a, c, g, or t
  misc_feature (43)..(44): n is a, c, g, or t
  misc_feature (53)..(54): n is a, c, g, or t
tttttttaagcagtggtatcaacgcagagtacnnaaggtgcannacgcctatnntttttttttttttttttttttttttttttt

SEQ ID NO: 3296 - DNA, 84 bp, Artificial
  Barcode component
  misc_feature (33)..(34): n is a, c, g, or t
  misc_feature (43)..(44): n is a, c, g, or t
  misc_feature (53)..(54): n is a, c, g, or t
tttttttaagcagtggtatcaacgcagagtacnnaaggtgcannaacgacctnntttttttttttttttttttttttttttttt

SEQ ID NO: 3297 - DNA, 84 bp, Artificial
  Barcode component
  misc_feature (33)..(34): n is a, c, g, or t
  misc_feature (43)..(44): n is a, c, g, or t
  misc_feature (53)..(54): n is a, c, g, or t
tttttttaagcagtggtatcaacgcagagtacnnaaggtgcannatcaggctnntttttttttttttttttttttttttttttt

SEQ ID NO: 3298 - DNA, 84 bp, Artificial
  Barcode component
  misc_feature (33)..(34): n is a, c, g, or t
  misc_feature (43)..(44): n is a, c, g, or t
  misc_feature (53)..(54): n is a, c, g, or t
tttttttaagcagtggtatcaacgcagagtacnnaaggtgcanncaagttcgnntttttttttttttttttttttttttttttt

SEQ ID NO: 3299 - DNA, 84 bp, Artificial
  Barcode component
  misc_feature (33)..(34): n is a, c, g, or t
  misc_feature (43)..(44): n is a, c, g, or t
  misc_feature (53)..(54): n is a, c, g, or t
tttttttaagcagtggtatcaacgcagagtacnnaaggtgcanntagccaganntttttttttttttttttttttttttttttt

SEQ ID NO: 3300 - DNA, 84 bp, Artificial
  Barcode component
  misc_feature (33)..(34): n is a, c, g, or t
  misc_feature (43)..(44): n is a, c, g, or t
  misc_feature (53)..(54): n is a, c, g, or t
tttttttaagcagtggtatcaacgcagagtacnnaaggtgcanncaatcacgnntttttttttttttttttttttttttttttt

SEQ ID NO: 3301 - DNA, 84 bp, Artificial
  Barcode component
  misc_feature (33)..(34): n is a, c, g, or t
  misc_feature (43)..(44): n is a, c, g, or t
  misc_feature (53)..(54): n is a, c, g, or t
tttttttaagcagtggtatcaacgcagagtacnnaaggtgcanngcaacaagnntttttttttttttttttttttttttttttt

SEQ ID NO: 3302 - DNA, 84 bp, Artificial
  Barcode component
  misc_feature (33)..(34): n is a, c, g, or t
  misc_feature (43)..(44): n is a, c, g, or t
  misc_feature (53)..(54): n is a, c, g, or t
tttttttaagcagtggtatcaacgcagagtacnnaaggtgcanncacgacaanntttttttttttttttttttttttttttttt

SEQ ID NO: 3303 - DNA, 84 bp, Artificial
  Barcode component
  misc_feature (33)..(34): n is a, c, g, or t
  misc_feature (43)..(44): n is a, c, g, or t
  misc_feature (53)..(54): n is a, c, g, or t
tttttttaagcagtggtatcaacgcagagtacnnaaggtgcanntacggaganntttttttttttttttttttttttttttttt

SEQ ID NO: 3304 - DNA, 84 bp, Artificial
  Barcode component
  misc_feature (33)..(34): n is a, c, g, or t
  misc_feature (43)..(44): n is a, c, g, or t
  misc_feature (53)..(54): n is a, c, g, or t
tttttttaagcagtggtatcaacgcagagtacnnaaggtgcanncgacaaganntttttttttttttttttttttttttttttt

SEQ ID NO: 3305 - DNA, 84 bp, Artificial
  Barcode component
  misc_feature (33)..(34): n is a, c, g, or t
  misc_feature (43)..(44): n is a, c, g, or t
  misc_feature (53)..(54): n is a, c, g, or t
tttttttaagcagtggtatcaacgcagagtacnnaaggtgcanncgaagtganntttttttttttttttttttttttttttttt

SEQ ID NO: 3306 - DNA, 84 bp, Artificial
  Barcode component
  misc_feature (33)..(34): n is a, c, g, or t
  misc_feature (43)..(44): n is a, c, g, or t
  misc_feature (53)..(54): n is a, c, g, or t
tttttttaagcagtggtatcaacgcagagtacnnaaggtgcannagctggtanntttttttttttttttttttttttttttttt

SEQ ID NO: 3307 - DNA, 84 bp, Artificial
  Barcode component
  misc_feature (33)..(34): n is a, c, g, or t
  misc_feature (43)..(44): n is a, c, g, or t
  misc_feature (53)..(54): n is a, c, g, or t
tttttttaagcagtggtatcaacgcagagtacnnaaggtgcannaactaggcnntttttttttttttttttttttttttttttt

SEQ ID NO: 3308 - DNA, 84 bp, Artificial
  Barcode component
  misc_feature (33)..(34): n is a, c, g, or t
  misc_feature (43)..(44): n is a, c, g, or t
  misc_feature (53)..(54): n is a, c, g, or t
tttttttaagcagtggtatcaacgcagagtacnnaaggtgcanncagcaagtnntttttttttttttttttttttttttttttt

SEQ ID NO: 3309 - DNA, 84 bp, Artificial
  Barcode component
  misc_feature (33)..(34): n is a, c, g, or t
  misc_feature (43)..(44): n is a, c, g, or t
  misc_feature (53)..(54): n is a, c, g, or t
tttttttaagcagtggtatcaacgcagagtacnnaaggtgcannacgaggtanntttttttttttttttttttttttttttttt

SEQ ID NO: 3310 - DNA, 84 bp, Artificial
  Barcode component
  misc_feature (33)..(34): n is a, c, g, or t
  misc_feature (43)..(44): n is a, c, g, or t
  misc_feature (53)..(54): n is a, c, g, or t
tttttttaagcagtggtatcaacgcagagtacnnaaggtgcanncatcttccnntttttttttttttttttttttttttttttt

SEQ ID NO: 3311 - DNA, 84 bp, Artificial
  Barcode component
  misc_feature (33)..(34): n is a, c, g, or t
  misc_feature (43)..(44): n is a, c, g, or t
  misc_feature (53)..(54): n is a, c, g, or t
tttttttaagcagtggtatcaacgcagagtacnnaaggtgcanncctgaatcnntttttttttttttttttttttttttttttt

SEQ ID NO: 3312 - DNA, 84 bp, Artificial
  Barcode component
  misc_feature (33)..(34): n is a, c, g, or t
  misc_feature (43)..(44): n is a, c, g, or t
  misc_feature (53)..(54): n is a, c, g, or t
tttttttaagcagtggtatcaacgcagagtacnnaaggtgcanntgcagactnntttttttttttttttttttttttttttttt

SEQ ID NO: 3313 - DNA, 84 bp, Artificial
  Barcode component
  misc_feature (33)..(34): n is a, c, g, or t
  misc_feature (43)..(44): n is a, c, g, or t
  misc_feature (53)..(54): n is a, c, g, or t
tttttttaagcagtggtatcaacgcagagtacnnaaggtgcannagatgtggnntttttttttttttttttttttttttttttt

SEQ ID NO: 3314 - DNA, 84 bp, Artificial
  Barcode component
  misc_feature (33)..(34): n is a, c, g, or t
  misc_feature (43)..(44): n is a, c, g, or t
  misc_feature (53)..(54): n is a, c, g, or t
tttttttaagcagtggtatcaacgcagagtacnnaaggtgcannagttcgacnntttttttttttttttttttttttttttttt

SEQ ID NO: 3315 - DNA, 84 bp, Artificial
  Barcode component
  misc_feature (33)..(34): n is a, c, g, or t
  misc_feature (43)..(44): n is a, c, g, or t
  misc_feature (53)..(54): n is a, c, g, or t
tttttttaagcagtggtatcaacgcagagtacnnaaggtgcannacaacctcnntttttttttttttttttttttttttttttt

SEQ ID NO: 3316 - DNA, 84 bp, Artificial
  Barcode component
  misc_feature (33)..(34): n is a, c, g, or t
  misc_feature (43)..(44): n is a, c, g, or t
  misc_feature (53)..(54): n is a, c, g, or t
tttttttaagcagtggtatcaacgcagagtacnnaaggtgcanncatggtagnntttttttttttttttttttttttttttttt

SEQ ID NO: 3317 - DNA, 84 bp, Artificial
  Barcode component
  misc_feature (33)..(34): n is a, c, g, or t
  misc_feature (43)..(44): n is a, c, g, or t
  misc_feature (53)..(54): n is a, c, g, or t
tttttttaagcagtggtatcaacgcagagtacnnaaggtgcanncgtatctcnntttttttttttttttttttttttttttttt

SEQ ID NO: 3318 - DNA, 84 bp, Artificial
  Barcode component
  misc_feature (33)..(34): n is a, c, g, or t
  misc_feature (43)..(44): n is a, c, g, or t
  misc_feature (53)..(54): n is a, c, g, or t
tttttttaagcagtggtatcaacgcagagtacnnaaggtgcanncctagttcnntttttttttttttttttttttttttttttt

SEQ ID NO: 3319 - DNA, 84 bp, Artificial
  Barcode component
  misc_feature (33)..(34): n is a, c, g, or t
  misc_feature (43)..(44): n is a, c, g, or t
  misc_feature (53)..(54): n is a, c, g, or t
tttttttaagcagtggtatcaacgcagagtacnnaaggtgcanncaagagtcnntttttttttttttttttttttttttttttt

SEQ ID NO: 3320 - DNA, 84 bp, Artificial
  Barcode component
  misc_feature (33)..(34): n is a, c, g, or t
  misc_feature (43)..(44): n is a, c, g, or t
  misc_feature (53)..(54): n is a, c, g, or t
tttttttaagcagtggtatcaacgcagagtacnnacgatcgannaatcggcanntttttttttttttttttttttttttttttt

SEQ ID NO: 3321 - DNA, 84 bp, Artificial
  Barcode component
  misc_feature (33)..(34): n is a, c, g, or t
  misc_feature (43)..(44): n is a, c, g, or t
  misc_feature (53)..(54): n is a, c, g, or t
tttttttaagcagtggtatcaacgcagagtacnnacgatcganntacggcatnntttttttttttttttttttttttttttttt

SEQ ID NO: 3322 - DNA, 84 bp, Artificial
  Barcode component
  misc_feature (33)..(34): n is a, c, g, or t
  misc_feature (43)..(44): n is a, c, g, or t
  misc_feature (53)..(54): n is a, c, g, or t
tttttttaagcagtggtatcaacgcagagtacnnacgatcgannttggatcgnntttttttttttttttttttttttttttttt

SEQ ID NO: 3323 - DNA, 84 bp, Artificial
  Barcode component
  misc_feature (33)..(34): n is a, c, g, or t
  misc_feature (43)..(44): n is a, c, g, or t
  misc_feature (53)..(54): n is a, c, g, or t
tttttttaagcagtggtatcaacgcagagtacnnacgatcganntggaacganntttttttttttttttttttttttttttttt

SEQ ID NO: 3324 - DNA, 84 bp, Artificial
  Barcode component
  misc_feature (33)..(34): n is a, c, g, or t
  misc_feature (43)..(44): n is a, c, g, or t
  misc_feature (53)..(54): n is a, c, g, or t
tttttttaagcagtggtatcaacgcagagtacnnacgatcgannggcaatcanntttttttttttttttttttttttttttttt

SEQ ID NO: 3325 - DNA, 84 bp, Artificial
  Barcode component
  misc_feature (33)..(34): n is a, c, g, or t
  misc_feature (43)..(44): n is a, c, g, or t
  misc_feature (53)..(54): n is a, c, g, or t
tttttttaagcagtggtatcaacgcagagtacnnacgatcganngaatccganntttttttttttttttttttttttttttttt

SEQ ID NO: 3326 - DNA, 84 bp, Artificial
  Barcode component
  misc_feature (33)..(34): n is a, c, g, or t
  misc_feature (43)..(44): n is a, c, g, or t
  misc_feature (53)..(54): n is a, c, g, or t
tttttttaagcagtggtatcaacgcagagtacnnacgatcgannttacggtgnntttttttttttttttttttttttttttttt

SEQ ID NO: 3327 - DNA, 84 bp, Artificial
  Barcode component
  misc_feature (33)..(34): n is a, c, g, or t
  misc_feature (43)..(44): n is a, c, g, or t
  misc_feature (53)..(54): n is a, c, g, or t
tttttttaagcagtggtatcaacgcagagtacnnacgatcganncatatcggnntttttttttttttttttttttttttttttt

SEQ ID NO: 3328 - DNA, 84 bp, Artificial
  Barcode component
  misc_feature (33)..(34): n is a, c, g, or t
  misc_feature (43)..(44): n is a, c, g, or t
  misc_feature (53)..(54): n is a, c, g, or t
tttttttaagcagtggtatcaacgcagagtacnnacgatcganncttcggtanntttttttttttttttttttttttttttttt

SEQ ID NO: 3329 - DNA, 84 bp, Artificial
  Barcode component
  misc_feature (33)..(34): n is a, c, g, or t
  misc_feature (43)..(44): n is a, c, g, or t
  misc_feature (53)..(54): n is a, c, g, or t
tttttttaagcagtggtatcaacgcagagtacnnacgatcganntcctaacgnntttttttttttttttttttttttttttttt

SEQ ID NO: 3330 - DNA, 84 bp, Artificial
  Barcode component
  misc_feature (33)..(34): n is a, c, g, or t
  misc_feature (43)..(44): n is a, c, g, or t
  misc_feature (53)..(54): n is a, c, g, or t
tttttttaagcagtggtatcaacgcagagtacnnacgatcganngtaagccanntttttttttttttttttttttttttttttt

SEQ ID NO: 3331 - DNA, 84 bp, Artificial
  Barcode component
  misc_feature (33)..(34): n is a, c, g, or t
  misc_feature (43)..(44): n is a, c, g, or t
  misc_feature (53)..(54): n is a, c, g, or t
tttttttaagcagtggtatcaacgcagagtacnnacgatcganntaaggtggnntttttttttttttttttttttttttttttt

SEQ ID NO: 3332 - DNA, 84 bp, Artificial
  Barcode component
  misc_feature (33)..(34): n is a, c, g, or t
  misc_feature (43)..(44): n is a, c, g, or t
  misc_feature (53)..(54): n is a, c, g, or t
tttttttaagcagtggtatcaacgcagagtacnnacgatcgannggtaagctnntttttttttttttttttttttttttttttt

SEQ ID NO: 3333 - DNA, 84 bp, Artificial
  Barcode component
  misc_feature (33)..(34): n is a, c, g, or t
  misc_feature (43)..(44): n is a, c, g, or t
  misc_feature (53)..(54): n is a, c, g, or t
tttttttaagcagtggtatcaacgcagagtacnnacgatcganntgtgtcganntttttttttttttttttttttttttttttt

SEQ ID NO: 3334 - DNA, 84 bp, Artificial
  Barcode component
  misc_feature (33)..(34): n is a, c, g, or t
  misc_feature (43)..(44): n is a, c, g, or t
  misc_feature (53)..(54): n is a, c, g, or t
tttttttaagcagtggtatcaacgcagagtacnnacgatcganngagcatganntttttttttttttttttttttttttttttt

SEQ ID NO: 3335 - DNA, 84 bp, Artificial
  Barcode component
  misc_feature (33)..(34): n is a, c, g, or t
  misc_feature (43)..(44): n is a, c, g, or t
  misc_feature (53)..(54): n is a, c, g, or t
tttttttaagcagtggtatcaacgcagagtacnnacgatcganntcgaagtcnntttttttttttttttttttttttttttttt

SEQ ID NO: 3336 - DNA, 84 bp, Artificial
  Barcode component
  misc_feature (33)..(34): n is a, c, g, or t
  misc_feature (43)..(44): n is a, c, g, or t
  misc_feature (53)..(54): n is a, c, g, or t
tttttttaagcagtggtatcaacgcagagtacnnacgatcgannggtgaacanntttttttttttttttttttttttttttttt

SEQ ID NO: 3337 - DNA, 84 bp, Artificial
  Barcode component
  misc_feature (33)..(34): n is a, c, g, or t
  misc_feature (43)..(44): n is a, c, g, or t
  misc_feature (53)..(54): n is a, c, g, or t
tttttttaagcagtggtatcaacgcagagtacnnacgatcgannacatgcacnntttttttttttttttttttttttttttttt

SEQ ID NO: 3338 - DNA, 84 bp, Artificial
  Barcode component
  misc_feature (33)..(34): n is a, c, g, or t
  misc_feature (43)..(44): n is a, c, g, or t
  misc_feature (53)..(54): n is a, c, g, or t
tttttttaagcagtggtatcaacgcagagtacnnacgatcgannccaacagtnntttttttttttttttttttttttttttttt

SEQ ID NO: 3339 - DNA, 84 bp, Artificial
  Barcode component
  misc_feature (33)..(34): n is a, c, g, or t
  misc_feature (43)..(44): n is a, c, g, or t
  misc_feature (53)..(54): n is a, c, g, or t
tttttttaagcagtggtatcaacgcagagtacnnacgatcgannagaacagcnntttttttttttttttttttttttttttttt

SEQ ID NO: 3340 - DNA, 84 bp, Artificial
  Barcode component
  misc_feature (33)..(34): n is a, c, g, or t
  misc_feature (43)..(44): n is a, c, g, or t
  misc_feature (53)..(54): n is a, c, g, or t
tttttttaagcagtggtatcaacgcagagtacnnacgatcganngaacacgtnntttttttttttttttttttttttttttttt

SEQ ID NO: 3341 - DNA, 84 bp, Artificial
  Barcode component
  misc_feature (33)..(34): n is a, c, g, or t
  misc_feature (43)..(44): n is a, c, g, or t
  misc_feature (53)..(54): n is a, c, g, or t
tttttttaagcagtggtatcaacgcagagtacnnacgatcgannggtcttcanntttttttttttttttttttttttttttttt

SEQ ID NO: 3342 - DNA, 84 bp, Artificial
  Barcode component
  misc_feature (33)..(34): n is a, c, g, or t
  misc_feature (43)..(44): n is a, c, g, or t
  misc_feature (53)..(54): n is a, c, g, or t
tttttttaagcagtggtatcaacgcagagtacnnacgatcgannaggttcagnntttttttttttttttttttttttttttttt

SEQ ID NO: 3343 - DNA, 84 bp, Artificial
  Barcode component
  misc_feature (33)..(34): n is a, c, g, or t
  misc_feature (43)..(44): n is a, c, g, or t
  misc_feature (53)..(54): n is a, c, g, or t
tttttttaagcagtggtatcaacgcagagtacnnacgatcgannctagagcanntttttttttttttttttttttttttttttt

SEQ ID NO: 3344 - DNA, 84 bp, Artificial
  Barcode component
  misc_feature (33)..(34): n is a, c, g, or t
  misc_feature (43)..(44): n is a, c, g, or t
  misc_feature (53)..(54): n is a, c, g, or t
tttttttaagcagtggtatcaacgcagagtacnnacgatcganncttctagcnntttttttttttttttttttttttttttttt

SEQ ID NO: 3345 - DNA, 84 bp, Artificial
  Barcode component
  misc_feature (33)..(34): n is a, c, g, or t
  misc_feature (43)..(44): n is a, c, g, or t
  misc_feature (53)..(54): n is a, c, g, or t
tttttttaagcagtggtatcaacgcagagtacnnacgatcganngagtaacgnntttttttttttttttttttttttttttttt

SEQ ID NO: 3346 - DNA, 84 bp, Artificial
  Barcode component
  misc_feature (33)..(34): n is a, c, g, or t
  misc_feature (43)..(44): n is a, c, g, or t
  misc_feature (53)..(54): n is a, c, g, or t
tttttttaagcagtggtatcaacgcagagtacnnacgatcgannctaagaggnntttttttttttttttttttttttttttttt

SEQ ID NO: 3347 - DNA, 84 bp, Artificial
  Barcode component
  misc_feature (33)..(34): n is a, c, g, or t
  misc_feature (43)..(44): n is a, c, g, or t
  misc_feature (53)..(54): n is a, c, g, or t
tttttttaagcagtggtatcaacgcagagtacnnacgatcgannacgtgtagnntttttttttttttttttttttttttttttt

SEQ ID NO: 3348 - DNA, 84 bp, Artificial
  Barcode component
  misc_feature (33)..(34): n is a, c, g, or t
  misc_feature (43)..(44): n is a, c, g, or t
  misc_feature (53)..(54): n is a, c, g, or t
tttttttaagcagtggtatcaacgcagagtacnnacgatcgannactacaggnntttttttttttttttttttttttttttttt

SEQ ID NO: 3349 - DNA, 84 bp, Artificial
  Barcode component
  misc_feature (33)..(34): n is a, c, g, or t
  misc_feature (43)..(44): n is a, c, g, or t
  misc_feature (53)..(54): n is a, c, g, or t
tttttttaagcagtggtatcaacgcagagtacnnacgatcganntacaggtcnntttttttttttttttttttttttttttttt

SEQ ID NO: 3350 - DNA, 84 bp, Artificial
  Barcode component
  misc_feature (33)..(34): n is a, c, g, or t
  misc_feature (43)..(44): n is a, c, g, or t
  misc_feature (53)..(54): n is a, c, g, or t
tttttttaagcagtggtatcaacgcagagtacnnacgatcgannctcacatgnntttttttttttttttttttttttttttttt

SEQ ID NO: 3351 - DNA, 84 bp, Artificial
  Barcode component
  misc_feature (33)..(34): n is a, c, g, or t
  misc_feature (43)..(44): n is a, c, g, or t
  misc_feature (53)..(54): n is a, c, g, or t
tttttttaagcagtggtatcaacgcagagtacnnacgatcgannactaggagnntttttttttttttttttttttttttttttt

SEQ ID NO: 3352 - DNA, 84 bp, Artificial
  Barcode component
  misc_feature (33)..(34): n is a, c, g, or t
  misc_feature (43)..(44): n is a, c, g, or t
  misc_feature (53)..(54): n is a, c, g, or t
tttttttaagcagtggtatcaacgcagagtacnnacgatcgannccatagganntttttttttttttttttttttttttttttt

SEQ ID NO: 3353 - DNA, 84 bp, Artificial
  Barcode component
  misc_feature (33)..(34): n is a, c, g, or t
  misc_feature (43)..(44): n is a, c, g, or t
  misc_feature (53)..(54): n is a, c, g, or t
tttttttaagcagtggtatcaacgcagagtacnnacgatcgannggagaatcnntttttttttttttttttttttttttttttt

SEQ ID NO: 3354 - DNA, 84 bp, Artificial
  Barcode component
  misc_feature (33)..(34): n is a, c, g, or t
  misc_feature (43)..(44): n is a, c, g, or t
  misc_feature (53)..(54): n is a, c, g, or t
tttttttaagcagtggtatcaacgcagagtacnnacgatcganngccaagaanntttttttttttttttttttttttttttttt

SEQ ID NO: 3355 - DNA, 84 bp, Artificial
  Barcode component
  misc_feature (33)..(34): n is a, c, g, or t
  misc_feature (43)..(44): n is a, c, g, or t
  misc_feature (53)..(54): n is a, c, g, or t
tttttttaagcagtggtatcaacgcagagtacnnacgatcgannaaggcaagnntttttttttttttttttttttttttttttt

SEQ ID NO: 3356 - DNA, 84 bp, Artificial
  Barcode component
  misc_feature (33)..(34): n is a, c, g, or t
  misc_feature (43)..(44): n is a, c, g, or t
  misc_feature (53)..(54): n is a, c, g, or t
tttttttaagcagtggtatcaacgcagagtacnnacgatcgannaatgtcgcnntttttttttttttttttttttttttttttt

SEQ ID NO: 3357 - DNA, 84 bp, Artificial
  Barcode component
  misc_feature (33)..(34): n is a, c, g, or t
  misc_feature (43)..(44): n is a, c, g, or t
  misc_feature (53)..(54): n is a, c, g, or t
tttttttaagcagtggtatcaacgcagagtacnnacgatcgannatggaaccnntttttttttttttttttttttttttttttt

SEQ ID NO: 3358 - DNA, 84 bp, Artificial
  Barcode component
  misc_feature (33)..(34): n is a, c, g, or t
  misc_feature (43)..(44): n is a, c, g, or t
  misc_feature (53)..(54): n is a, c, g, or t
tttttttaagcagtggtatcaacgcagagtacnnacgatcgannagaggcatnntttttttttttttttttttttttttttttt

SEQ ID NO: 3359 - DNA, 84 bp, Artificial
  Barcode component
  misc_feature (33)..(34): n is a, c, g, or t
  misc_feature (43)..(44): n is a, c, g, or t
  misc_feature (53)..(54): n is a, c, g, or t
tttttttaagcagtggtatcaacgcagagtacnnacgatcganntgcatagcnntttttttttttttttttttttttttttttt

SEQ ID NO: 3360 - DNA, 84 bp, Artificial
  Barcode component
  misc_feature (33)..(34): n is a, c, g, or t
  misc_feature (43)..(44): n is a, c, g, or t
  misc_feature (53)..(54): n is a, c, g, or t
tttttttaagcagtggtatcaacgcagagtacnnacgatcgannctaacgganntttttttttttttttttttttttttttttt

SEQ ID NO: 3361 - DNA, 84 bp, Artificial
  Barcode component
  misc_feature (33)..(34): n is a, c, g, or t
  misc_feature (43)..(44): n is a, c, g, or t
  misc_feature (53)..(54): n is a, c, g, or t
tttttttaagcagtggtatcaacgcagagtacnnacgatcganntatcgaggnntttttttttttttttttttttttttttttt

SEQ ID NO: 3362 - DNA, 84 bp, Artificial
  Barcode component
  misc_feature (33)..(34): n is a, c, g, or t
  misc_feature (43)..(44): n is a, c, g, or t
  misc_feature (53)..(54): n is a, c, g, or t
tttttttaagcagtggtatcaacgcagagtacnnacgatcganncatagcctnntttttttttttttttttttttttttttttt

SEQ ID NO: 3363 - DNA, 84 bp, Artificial
  Barcode component
  misc_feature (33)..(34): n is a, c, g, or t
  misc_feature (43)..(44): n is a, c, g, or t
  misc_feature (53)..(54): n is a, c, g, or t
tttttttaagcagtggtatcaacgcagagtacnnacgatcgannatcgagacnntttttttttttttttttttttttttttttt

SEQ ID NO: 3364 - DNA, 84 bp, Artificial
  Barcode component
  misc_feature (33)..(34): n is a, c, g, or t
  misc_feature (43)..(44): n is a, c, g, or t
  misc_feature (53)..(54): n is a, c, g, or t
tttttttaagcagtggtatcaacgcagagtacnnacgatcgannggaagagtnntttttttttttttttttttttttttttttt

SEQ ID NO: 3365 - DNA, 84 bp, Artificial
  Barcode component
  misc_feature (33)..(34): n is a, c, g, or t
  misc_feature (43)..(44): n is a, c, g, or t
  misc_feature (53)..(54): n is a, c, g, or t
tttttttaagcagtggtatcaacgcagagtacnnacgatcgannccaagtagnntttttttttttttttttttttttttttttt

SEQ ID NO: 3366 - DNA, 84 bp, Artificial
  Barcode component
  misc_feature (33)..(34): n is a, c, g, or t
  misc_feature (43)..(44): n is a, c, g, or t
  misc_feature (53)..(54): n is a, c, g, or t
tttttttaagcagtggtatcaacgcagagtacnnacgatcgannctgaacagnntttttttttttttttttttttttttttttt

SEQ ID NO: 3367 - DNA, 84 bp, Artificial
  Barcode component
  misc_feature (33)..(34): n is a, c, g, or t
  misc_feature (43)..(44): n is a, c, g, or t
  misc_feature (53)..(54): n is a, c, g, or t
tttttttaagcagtggtatcaacgcagagtacnnacgatcganngtaggttcnntttttttttttttttttttttttttttttt

SEQ ID NO: 3368 - DNA, 84 bp, Artificial
  Barcode component
  misc_feature (33)..(34): n is a, c, g, or t
  misc_feature (43)..(44): n is a, c, g, or t
  misc_feature (53)..(54): n is a, c, g, or t
tttttttaagcagtggtatcaacgcagagtacnnacgatcganngtatggacnntttttttttttttttttttttttttttttt

SEQ ID NO: 3369 - DNA, 84 bp, Artificial
  Barcode component
  misc_feature (33)..(34): n is a, c, g, or t
  misc_feature (43)..(44): n is a, c, g, or t
  misc_feature (53)..(54): n is a, c, g, or t
tttttttaagcagtggtatcaacgcagagtacnnacgatcganntcgcaacanntttttttttttttttttttttttttttttt

SEQ ID NO: 3370 - DNA, 84 bp, Artificial
  Barcode component
  misc_feature (33)..(34): n is a, c, g, or t
  misc_feature (43)..(44): n is a, c, g, or t
  misc_feature (53)..(54): n is a, c, g, or t
tttttttaagcagtggtatcaacgcagagtacnnacgatcgannccgctaatnntttttttttttttttttttttttttttttt

SEQ ID NO: 3371 - DNA, 84 bp, Artificial
  Barcode component
  misc_feature (33)..(34): n is a, c, g, or t
  misc_feature (43)..(44): n is a, c, g, or t
  misc_feature (53)..(54): n is a, c, g, or t
tttttttaagcagtggtatcaacgcagagtacnnacgatcganngattcgcanntttttttttttttttttttttttttttttt

SEQ ID NO: 3372 - DNA, 84 bp, Artificial
  Barcode component
  misc_feature (33)..(34): n is a, c, g, or t
  misc_feature (43)..(44): n is a, c, g, or t
  misc_feature (53)..(54): n is a, c, g, or t
tttttttaagcagtggtatcaacgcagagtacnnacgatcganncgatggaanntttttttttttttttttttttttttttttt

SEQ ID NO: 3373 - DNA, 84 bp, Artificial
  Barcode component
  misc_feature (33)..(34): n is a, c, g, or t
  misc_feature (43)..(44): n is a, c, g, or t
  misc_feature (53)..(54): n is a, c, g, or t
tttttttaagcagtggtatcaacgcagagtacnnacgatcgannagcaagganntttttttttttttttttttttttttttttt

SEQ ID NO: 3374 - DNA, 84 bp, Artificial
  Barcode component
  misc_feature (33)..(34): n is a, c, g, or t
  misc_feature (43)..(44): n is a, c, g, or t
  misc_feature (53)..(54): n is a, c, g, or t
tttttttaagcagtggtatcaacgcagagtacnnacgatcganncgtagcaanntttttttttttttttttttttttttttttt

SEQ ID NO: 3375 - DNA, 84 bp, Artificial
  Barcode component
  misc_feature (33)..(34): n is a, c, g, or t
  misc_feature (43)..(44): n is a, c, g, or t
  misc_feature (53)..(54): n is a, c, g, or t
tttttttaagcagtggtatcaacgcagagtacnnacgatcganntggcagtanntttttttttttttttttttttttttttttt

SEQ ID NO: 3376 - DNA, 84 bp, Artificial
  Barcode component
  misc_feature (33)..(34): n is a, c, g, or t
  misc_feature (43)..(44): n is a, c, g, or t
  misc_feature (53)..(54): n is a, c, g, or t
tttttttaagcagtggtatcaacgcagagtacnnacgatcganncggtagttnntttttttttttttttttttttttttttttt

SEQ ID NO: 3377 - DNA, 84 bp, Artificial
  Barcode component
  misc_feature (33)..(34): n is a, c, g, or t
  misc_feature (43)..(44): n is a, c, g, or t
  misc_feature (53)..(54): n is a, c, g, or t
tttttttaagcagtggtatcaacgcagagtacnnacgatcganntgacttcgnntttttttttttttttttttttttttttttt

SEQ ID NO: 3378 - DNA, 84 bp, Artificial
  Barcode component
  misc_feature (33)..(34): n is a, c, g, or t
  misc_feature (43)..(44): n is a, c, g, or t
  misc_feature (53)..(54): n is a, c, g, or t
tttttttaagcagtggtatcaacgcagagtacnnacgatcganngagtgcaanntttttttttttttttttttttttttttttt

SEQ ID NO: 3379 - DNA, 84 bp, Artificial
  Barcode component
  misc_feature (33)..(34): n is a, c, g, or t
  misc_feature (43)..(44): n is a, c, g, or t
  misc_feature (53)..(54): n is a, c, g, or t
tttttttaagcagtggtatcaacgcagagtacnnacgatcgannacggtaacnntttttttttttttttttttttttttttttt

SEQ ID NO: 3380 - DNA, 84 bp, Artificial
  Barcode component
  misc_feature (33)..(34): n is a, c, g, or t
  misc_feature (43)..(44): n is a, c, g, or t
  misc_feature (53)..(54): n is a, c, g, or t
tttttttaagcagtggtatcaacgcagagtacnnacgatcgannaagtggtgnntttttttttttttttttttttttttttttt

SEQ ID NO: 3381 - DNA, 84 bp, Artificial
  Barcode component
  misc_feature (33)..(34): n is a, c, g, or t
  misc_feature (43)..(44): n is a, c, g, or t
  misc_feature (53)..(54): n is a, c, g, or t
tttttttaagcagtggtatcaacgcagagtacnnacgatcgannggagacaanntttttttttttttttttttttttttttttt

SEQ ID NO: 3382 - DNA, 84 bp, Artificial
  Barcode component
  misc_feature (33)..(34): n is a, c, g, or t
  misc_feature (43)..(44): n is a, c, g, or t
  misc_feature (53)..(54): n is a, c, g, or t
tttttttaagcagtggtatcaacgcagagtacnnacgatcganntcaaggacnntttttttttttttttttttttttttttttt

SEQ ID NO: 3383 - DNA, 84 bp, Artificial
  Barcode component
  misc_feature (33)..(34): n is a, c, g, or t
  misc_feature (43)..(44): n is a, c, g, or t
  misc_feature (53)..(54): n is a, c, g, or t
tttttttaagcagtggtatcaacgcagagtacnnacgatcgannaagagagcnntttttttttttttttttttttttttttttt

SEQ ID NO: 3384 - DNA, 84 bp, Artificial
  Barcode component
  misc_feature (33)..(34): n is a, c, g, or t
  misc_feature (43)..(44): n is a, c, g, or t
  misc_feature (53)..(54): n is a, c, g, or t
tttttttaagcagtggtatcaacgcagagtacnnacgatcganncgagagatnntttttttttttttttttttttttttttttt

SEQ ID NO: 3385 - DNA, 84 bp, Artificial
  Barcode component
  misc_feature (33)..(34): n is a, c, g, or t
  misc_feature (43)..(44): n is a, c, g, or t
  misc_feature (53)..(54): n is a, c, g, or t
tttttttaagcagtggtatcaacgcagagtacnnacgatcgannacagatggnntttttttttttttttttttttttttttttt

SEQ ID NO: 3386 - DNA, 84 bp, Artificial
  Barcode component
  misc_feature (33)..(34): n is a, c, g, or t
  misc_feature (43)..(44): n is a, c, g, or t
  misc_feature (53)..(54): n is a, c, g, or t
tttttttaagcagtggtatcaacgcagagtacnnacgatcgannaggagtcanntttttttttttttttttttttttttttttt

SEQ ID NO: 3387 - DNA, 84 bp, Artificial
  Barcode component
  misc_feature (33)..(34): n is a, c, g, or t
  misc_feature (43)..(44): n is a, c, g, or t
  misc_feature (53)..(54): n is a, c, g, or t
tttttttaagcagtggtatcaacgcagagtacnnacgatcganncgtgttacnntttttttttttttttttttttttttttttt

SEQ ID NO: 3388 - DNA, 84 bp, Artificial
  Barcode component
  misc_feature (33)..(34): n is a, c, g, or t
  misc_feature (43)..(44): n is a, c, g, or t
  misc_feature (53)..(54): n is a, c, g, or t
tttttttaagcagtggtatcaacgcagagtacnnacgatcganntagtgtgcnntttttttttttttttttttttttttttttt

SEQ ID NO: 3389 - DNA, 84 bp, Artificial
  Barcode component
  misc_feature (33)..(34): n is a, c, g, or t
  misc_feature (43)..(44): n is a, c, g, or t
  misc_feature (53)..(54): n is a, c, g, or t
tttttttaagcagtggtatcaacgcagagtacnnacgatcgannctcatgacnntttttttttttttttttttttttttttttt

SEQ ID NO: 3390 - DNA, 84 bp, Artificial
  Barcode component
  misc_feature (33)..(34): n is a, c, g, or t
  misc_feature (43)..(44): n is a, c, g, or t
  misc_feature (53)..(54): n is a, c, g, or t
tttttttaagcagtggtatcaacgcagagtacnnacgatcganngtatccagnntttttttttttttttttttttttttttttt

SEQ ID NO: 3391 - DNA, 84 bp, Artificial
  Barcode component
  misc_feature (33)..(34): n is a, c, g, or t
  misc_feature (43)..(44): n is a, c, g, or t
  misc_feature (53)..(54): n is a, c, g, or t
tttttttaagcagtggtatcaacgcagagtacnnacgatcgannacgcctatnntttttttttttttttttttttttttttttt

SEQ ID NO: 3392 - DNA, 84 bp, Artificial
  Barcode component
  misc_feature (33)..(34): n is a, c, g, or t
  misc_feature (43)..(44): n is a, c, g, or t
  misc_feature (53)..(54): n is a, c, g, or t
tttttttaagcagtggtatcaacgcagagtacnnacgatcgannaacgacctnntttttttttttttttttttttttttttttt

SEQ ID NO: 3393 - DNA, 84 bp, Artificial
  Barcode component
  misc_feature (33)..(34): n is a, c, g, or t
  misc_feature (43)..(44): n is a, c, g, or t
  misc_feature (53)..(54): n is a, c, g, or t
tttttttaagcagtggtatcaacgcagagtacnnacgatcgannatcaggctnntttttttttttttttttttttttttttttt

SEQ ID NO: 3394 - DNA, 84 bp, Artificial
  Barcode component
  misc_feature (33)..(34): n is a, c, g, or t
  misc_feature (43)..(44): n is a, c, g, or t
  misc_feature (53)..(54): n is a, c, g, or t
tttttttaagcagtggtatcaacgcagagtacnnacgatcganncaagttcgnntttttttttttttttttttttttttttttt

SEQ ID NO: 3395 - DNA, 84 bp, Artificial
  Barcode component
  misc_feature (33)..(34): n is a, c, g, or t
  misc_feature (43)..(44): n is a, c, g, or t
  misc_feature (53)..(54): n is a, c, g, or t
tttttttaagcagtggtatcaacgcagagtacnnacgatcganntagccaganntttttttttttttttttttttttttttttt

SEQ ID NO: 3396 - DNA, 84 bp, Artificial
  Barcode component
  misc_feature (33)..(34): n is a, c, g, or t
  misc_feature (43)..(44): n is a, c, g, or t
  misc_feature (53)..(54): n is a, c, g, or t
tttttttaagcagtggtatcaacgcagagtacnnacgatcganncaatcacgnntttttttttttttttttttttttttttttt

SEQ ID NO: 3397 - DNA, 84 bp, Artificial
  Barcode component
  misc_feature (33)..(34): n is a, c, g, or t
  misc_feature (43)..(44): n is a, c, g, or t
  misc_feature (53)..(54): n is a, c, g, or t
tttttttaagcagtggtatcaacgcagagtacnnacgatcganngcaacaagnntttttttttttttttttttttttttttttt

SEQ ID NO: 3398 - DNA, 84 bp, Artificial
  Barcode component
  misc_feature (33)..(34): n is a, c, g, or t
  misc_feature (43)..(44): n is a, c, g, or t
  misc_feature (53)..(54): n is a, c, g, or t
tttttttaagcagtggtatcaacgcagagtacnnacgatcganncacgacaanntttttttttttttttttttttttttttttt

SEQ ID NO: 3399 - DNA, 84 bp, Artificial
  Barcode component
  misc_feature (33)..(34): n is a, c, g, or t
  misc_feature (43)..(44): n is a, c, g, or t
  misc_feature (53)..(54): n is a, c, g, or t
tttttttaagcagtggtatcaacgcagagtacnnacgatcganntacggaganntttttttttttttttttttttttttttttt

SEQ ID NO: 3400 - DNA, 84 bp, Artificial
  Barcode component
  misc_feature (33)..(34): n is a, c, g, or t
  misc_feature (43)..(44): n is a, c, g, or t
  misc_feature (53)..(54): n is a, c, g, or t
tttttttaagcagtggtatcaacgcagagtacnnacgatcganncgacaaganntttttttttttttttttttttttttttttt

SEQ ID NO: 3401 - DNA, 84 bp, Artificial
  Barcode component
  misc_feature (33)..(34): n is a, c, g, or t
  misc_feature (43)..(44): n is a, c, g, or t
  misc_feature (53)..(54): n is a, c, g, or t
tttttttaagcagtggtatcaacgcagagtacnnacgatcganncgaagtganntttttttttttttttttttttttttttttt

SEQ ID NO: 3402 - DNA, 84 bp, Artificial
  Barcode component
  misc_feature (33)..(34): n is a, c, g, or t
  misc_feature (43)..(44): n is a, c, g, or t
  misc_feature (53)..(54): n is a, c, g, or t
tttttttaagcagtggtatcaacgcagagtacnnacgatcgannagctggtanntttttttttttttttttttttttttttttt

SEQ ID NO: 3403 - DNA, 84 bp, Artificial
  Barcode component
  misc_feature (33)..(34): n is a, c, g, or t
  misc_feature (43)..(44): n is a, c, g, or t
  misc_feature (53)..(54): n is a, c, g, or t
tttttttaagcagtggtatcaacgcagagtacnnacgatcgannaactaggcnntttttttttttttttttttttttttttttt

SEQ ID NO: 3404 - DNA, 84 bp, Artificial
  Barcode component
  misc_feature (33)..(34): n is a, c, g, or t
  misc_feature (43)..(44): n is a, c, g, or t
  misc_feature (53)..(54): n is a, c, g, or t
tttttttaagcagtggtatcaacgcagagtacnnacgatcganncagcaagtnntttttttttttttttttttttttttttttt

SEQ ID NO: 3405 - DNA, 84 bp, Artificial
  Barcode component
  misc_feature (33)..(34): n is a, c, g, or t
  misc_feature (43)..(44): n is a, c, g, or t
  misc_feature (53)..(54): n is a, c, g, or t
tttttttaagcagtggtatcaacgcagagtacnnacgatcgannacgaggtanntttttttttttttttttttttttttttttt

SEQ ID NO: 3406 - DNA, 84 bp, Artificial
  Barcode component
  misc_feature (33)..(34): n is a, c, g, or t
  misc_feature (43)..(44): n is a, c, g, or t
  misc_feature (53)..(54): n is a, c, g, or t
tttttttaagcagtggtatcaacgcagagtacnnacgatcganncatcttccnntttttttttttttttttttttttttttttt

SEQ ID NO: 3407 - DNA, 84 bp, Artificial
  Barcode component
  misc_feature (33)..(34): n is a, c, g, or t
  misc_feature (43)..(44): n is a, c, g, or t
  misc_feature (53)..(54): n is a, c, g, or t
tttttttaagcagtggtatcaacgcagagtacnnacgatcganncctgaatcnntttttttttttttttttttttttttttttt

SEQ ID NO: 3408 - DNA, 84 bp, Artificial
  Barcode component
  misc_feature (33)..(34): n is a, c, g, or t
  misc_feature (43)..(44): n is a, c, g, or t
  misc_feature (53)..(54): n is a, c, g, or t
tttttttaagcagtggtatcaacgcagagtacnnacgatcganntgcagactnntttttttttttttttttttttttttttttt

SEQ ID NO: 3409 - DNA, 84 bp, Artificial
  Barcode component
  misc_feature (33)..(34): n is a, c, g, or t
  misc_feature (43)..(44): n is a, c, g, or t
  misc_feature (53)..(54): n is a, c, g, or t
tttttttaagcagtggtatcaacgcagagtacnnacgatcgannagatgtggnntttttttttttttttttttttttttttttt

SEQ ID NO: 3410 - DNA, 84 bp, Artificial
  Barcode component
  misc_feature (33)..(34): n is a, c, g, or t
  misc_feature (43)..(44): n is a, c, g, or t
  misc_feature (53)..(54): n is a, c, g, or t
tttttttaagcagtggtatcaacgcagagtacnnacgatcgannagttcgacnntttttttttttttttttttttttttttttt

SEQ ID NO: 3411 - DNA, 84 bp, Artificial
  Barcode component
  misc_feature (33)..(34): n is a, c, g, or t
  misc_feature (43)..(44): n is a, c, g, or t
  misc_feature (53)..(54): n is a, c, g, or t
tttttttaagcagtggtatcaacgcagagtacnnacgatcgannacaacctcnntttttttttttttttttttttttttttttt

SEQ ID NO: 3412 - DNA, 84 bp, Artificial
  Barcode component
  misc_feature (33)..(34): n is a, c, g, or t
  misc_feature (43)..(44): n is a, c, g, or t
  misc_feature (53)..(54): n is a, c, g, or t
tttttttaagcagtggtatcaacgcagagtacnnacgatcganncatggtagnntttttttttttttttttttttttttttttt

SEQ ID NO: 3413 - DNA, 84 bp, Artificial
  Barcode component
  misc_feature (33)..(34): n is a, c, g, or t
  misc_feature (43)..(44): n is a, c, g, or t
  misc_feature (53)..(54): n is a, c, g, or t
tttttttaagcagtggtatcaacgcagagtacnnacgatcganncgtatctcnntttttttttttttttttttttttttttttt

SEQ ID NO: 3414 - DNA, 84 bp, Artificial
  Barcode component
  misc_feature (33)..(34): n is a, c, g, or t
  misc_feature (43)..(44): n is a, c, g, or t
  misc_feature (53)..(54): n is a, c, g, or t
tttttttaagcagtggtatcaacgcagagtacnnacgatcganncctagttcnntttttttttttttttttttttttttttttt

SEQ ID NO: 3415 - DNA, 84 bp, Artificial
  Barcode component
  misc_feature (33)..(34): n is a, c, g, or t
  misc_feature (43)..(44): n is a, c, g, or t
  misc_feature (53)..(54): n is a, c, g, or t
tttttttaagcagtggtatcaacgcagagtacnnacgatcganncaagagtcnntttttttttttttttttttttttttttttt

SEQ ID NO: 3416 - DNA, 84 bp, Artificial
  Barcode component
  misc_feature (33)..(34): n is a, c, g, or t
  misc_feature (43)..(44): n is a, c, g, or t
  misc_feature (53)..(54): n is a, c, g, or t
tttttttaagcagtggtatcaacgcagagtacnnagaatcggnnaatcggcanntttttttttttttttttttttttttttttt

SEQ ID NO: 3417 - DNA, 84 bp, Artificial
  Barcode component
  misc_feature (33)..(34): n is a, c, g, or t
  misc_feature (43)..(44): n is a, c, g, or t
  misc_feature (53)..(54): n is a, c, g, or t
tttttttaagcagtggtatcaacgcagagtacnnagaatcggnntacggcatnntttttttttttttttttttttttttttttt

SEQ ID NO: 3418 - DNA, 84 bp, Artificial
  Barcode component
  misc_feature (33)..(34): n is a, c, g, or t
  misc_feature (43)..(44): n is a, c, g, or t
  misc_feature (53)..(54): n is a, c, g, or t
tttttttaagcagtggtatcaacgcagagtacnnagaatcggnnttggatcgnntttttttttttttttttttttttttttttt

SEQ ID NO: 3419 - DNA, 84 bp, Artificial
  Barcode component
  misc_feature (33)..(34): n is a, c, g, or t
  misc_feature (43)..(44): n is a, c, g, or t
  misc_feature (53)..(54): n is a, c, g, or t
tttttttaagcagtggtatcaacgcagagtacnnagaatcggnntggaacganntttttttttttttttttttttttttttttt

SEQ ID NO: 3420 - DNA, 84 bp, Artificial
  Barcode component
  misc_feature (33)..(34): n is a, c, g, or t
  misc_feature (43)..(44): n is a, c, g, or t
  misc_feature (53)..(54): n is a, c, g, or t
tttttttaagcagtggtatcaacgcagagtacnnagaatcggnnggcaatcanntttttttttttttttttttttttttttttt

SEQ ID NO: 3421 - DNA, 84 bp, Artificial
  Barcode component
  misc_feature (33)..(34): n is a, c, g, or t
  misc_feature (43)..(44): n is a, c, g, or t
  misc_feature (53)..(54): n is a, c, g, or t
tttttttaagcagtggtatcaacgcagagtacnnagaatcggnngaatccganntttttttttttttttttttttttttttttt

SEQ ID NO: 3422 - DNA, 84 bp, Artificial
  Barcode component
  misc_feature (33)..(34): n is a, c, g, or t
  misc_feature (43)..(44): n is a, c, g, or t
  misc_feature (53)..(54): n is a, c, g, or t
tttttttaagcagtggtatcaacgcagagtacnnagaatcggnnttacggtgnntttttttttttttttttttttttttttttt

SEQ ID NO: 3423 - DNA, 84 bp, Artificial
  Barcode component
  misc_feature (33)..(34): n is a, c, g, or t
  misc_feature (43)..(44): n is a, c, g, or t
  misc_feature (53)..(54): n is a, c, g, or t
tttttttaagcagtggtatcaacgcagagtacnnagaatcggnncatatcggnntttttttttttttttttttttttttttttt

SEQ ID NO: 3424 - DNA, 84 bp, Artificial
  Barcode component
  misc_feature (33)..(34): n is a, c, g, or t
  misc_feature (43)..(44): n is a, c, g, or t
  misc_feature (53)..(54): n is a, c, g, or t
tttttttaagcagtggtatcaacgcagagtacnnagaatcggnncttcggtanntttttttttttttttttttttttttttttt

SEQ ID NO: 3425 - DNA, 84 bp, Artificial
  Barcode component
  misc_feature (33)..(34): n is a, c, g, or t
  misc_feature (43)..(44): n is a, c, g, or t
  misc_feature (53)..(54): n is a, c, g, or t
tttttttaagcagtggtatcaacgcagagtacnnagaatcggnntcctaacgnntttttttttttttttttttttttttttttt

SEQ ID NO: 3426 - DNA, 84 bp, Artificial
  Barcode component
  misc_feature (33)..(34): n is a, c, g, or t
  misc_feature (43)..(44): n is a, c, g, or t
  misc_feature (53)..(54): n is a, c, g, or t
tttttttaagcagtggtatcaacgcagagtacnnagaatcggnngtaagccanntttttttttttttttttttttttttttttt

SEQ ID NO: 3427 - DNA, 84 bp, Artificial
  Barcode component
  misc_feature (33)..(34): n is a, c, g, or t
  misc_feature (43)..(44): n is a, c, g, or t
  misc_feature (53)..(54): n is a, c, g, or t
tttttttaagcagtggtatcaacgcagagtacnnagaatcggnntaaggtggnntttttttttttttttttttttttttttttt

SEQ ID NO: 3428 - DNA, 84 bp, Artificial
  Barcode component
  misc_feature (33)..(34): n is a, c, g, or t
  misc_feature (43)..(44): n is a, c, g, or t
  misc_feature (53)..(54): n is a, c, g, or t
tttttttaagcagtggtatcaacgcagagtacnnagaatcggnnggtaagctnntttttttttttttttttttttttttttttt

SEQ ID NO: 3429 - DNA, 84 bp, Artificial
  Barcode component
  misc_feature (33)..(34): n is a, c, g, or t
  misc_feature (43)..(44): n is a, c, g, or t
  misc_feature (53)..(54): n is a, c, g, or t
tttttttaagcagtggtatcaacgcagagtacnnagaatcggnntgtgtcganntttttttttttttttttttttttttttttt

SEQ ID NO: 3430 - DNA, 84 bp, Artificial
  Barcode component
  misc_feature (33)..(34): n is a, c, g, or t
  misc_feature (43)..(44): n is a, c, g, or t
  misc_feature (53)..(54): n is a, c, g, or t
tttttttaagcagtggtatcaacgcagagtacnnagaatcggnngagcatganntttttttttttttttttttttttttttttt

SEQ ID NO: 3431 - DNA, 84 bp, Artificial
  Barcode component
  misc_feature (33)..(34): n is a, c, g, or t
  misc_feature (43)..(44): n is a, c, g, or t
  misc_feature (53)..(54): n is a, c, g, or t
tttttttaagcagtggtatcaacgcagagtacnnagaatcggnntcgaagtcnntttttttttttttttttttttttttttttt

SEQ ID NO: 3432 - DNA, 84 bp, Artificial
  Barcode component
  misc_feature (33)..(34): n is a, c, g, or t
  misc_feature (43)..(44): n is a, c, g, or t
  misc_feature (53)..(54): n is a, c, g, or t
tttttttaagcagtggtatcaacgcagagtacnnagaatcggnnggtgaacanntttttttttttttttttttttttttttttt

SEQ ID NO: 3433 - DNA, 84 bp, Artificial
  Barcode component
  misc_feature (33)..(34): n is a, c, g, or t
  misc_feature (43)..(44): n is a, c, g, or t
  misc_feature (53)..(54): n is a, c, g, or t
tttttttaagcagtggtatcaacgcagagtacnnagaatcggnnacatgcacnntttttttttttttttttttttttttttttt

SEQ ID NO: 3434 - DNA, 84 bp, Artificial
  Barcode component
  misc_feature (33)..(34): n is a, c, g, or t
  misc_feature (43)..(44): n is a, c, g, or t
  misc_feature (53)..(54): n is a, c, g, or t
tttttttaagcagtggtatcaacgcagagtacnnagaatcggnnccaacagtnntttttttttttttttttttttttttttttt

SEQ ID NO: 3435 - DNA, 84 bp, Artificial
  Barcode component
  misc_feature (33)..(34): n is a, c, g, or t
  misc_feature (43)..(44): n is a, c, g, or t
  misc_feature (53)..(54): n is a, c, g, or t
tttttttaagcagtggtatcaacgcagagtacnnagaatcggnnagaacagcnntttttttttttttttttttttttttttttt

SEQ ID NO: 3436 - DNA, 84 bp, Artificial
  Barcode component
  misc_feature (33)..(34): n is a, c, g, or t
  misc_feature (43)..(44): n is a, c, g, or t
  misc_feature (53)..(54): n is a, c, g, or t
tttttttaagcagtggtatcaacgcagagtacnnagaatcggnngaacacgtnntttttttttttttttttttttttttttttt

SEQ ID NO: 3437 - DNA, 84 bp, Artificial
  Barcode component
  misc_feature (33)..(34): n is a, c, g, or t
  misc_feature (43)..(44): n is a, c, g, or t
  misc_feature (53)..(54): n is a, c, g, or t
tttttttaagcagtggtatcaacgcagagtacnnagaatcggnnggtcttcanntttttttttttttttttttttttttttttt

SEQ ID NO: 3438 - DNA, 84 bp, Artificial
  Barcode component
  misc_feature (33)..(34): n is a, c, g, or t
  misc_feature (43)..(44): n is a, c, g, or t
  misc_feature (53)..(54): n is a, c, g, or t
tttttttaagcagtggtatcaacgcagagtacnnagaatcggnnaggttcagnntttttttttttttttttttttttttttttt

SEQ ID NO: 3439 - DNA, 84 bp, Artificial
  Barcode component
  misc_feature (33)..(34): n is a, c, g, or t
  misc_feature (43)..(44): n is a, c, g, or t
  misc_feature (53)..(54): n is a, c, g, or t
tttttttaagcagtggtatcaacgcagagtacnnagaatcggnnctagagcanntttttttttttttttttttttttttttttt

SEQ ID NO: 3440 - DNA, 84 bp, Artificial
  Barcode component
  misc_feature (33)..(34): n is a, c, g, or t
  misc_feature (43)..(44): n is a, c, g, or t
  misc_feature (53)..(54): n is a, c, g, or t
tttttttaagcagtggtatcaacgcagagtacnnagaatcggnncttctagcnntttttttttttttttttttttttttttttt

SEQ ID NO: 3441 - DNA, 84 bp, Artificial
  Barcode component
  misc_feature (33)..(34): n is a, c, g, or t
  misc_feature (43)..(44): n is a, c, g, or t
  misc_feature (53)..(54): n is a, c, g, or t
tttttttaagcagtggtatcaacgcagagtacnnagaatcggnngagtaacgnntttttttttttttttttttttttttttttt

SEQ ID NO: 3442 - DNA, 84 bp, Artificial
  Barcode component
  misc_feature (33)..(34): n is a, c, g, or t
  misc_feature (43)..(44): n is a, c, g, or t
  misc_feature (53)..(54): n is a, c, g, or t
tttttttaagcagtggtatcaacgcagagtacnnagaatcggnnctaagaggnntttttttttttttttttttttttttttttt

SEQ ID NO: 3443 - DNA, 84 bp, Artificial
  Barcode component
  misc_feature (33)..(34): n is a, c, g, or t
  misc_feature (43)..(44): n is a, c, g, or t
  misc_feature (53)..(54): n is a, c, g, or t
tttttttaagcagtggtatcaacgcagagtacnnagaatcggnnacgtgtagnntttttttttttttttttttttttttttttt

SEQ ID NO: 3444 - DNA, 84 bp, Artificial
  Barcode component
  misc_feature (33)..(34): n is a, c, g, or t
  misc_feature (43)..(44): n is a, c, g, or t
  misc_feature (53)..(54): n is a, c, g, or t
tttttttaagcagtggtatcaacgcagagtacnnagaatcggnnactacaggnntttttttttttttttttttttttttttttt

SEQ ID NO: 3445 - DNA, 84 bp, Artificial
  Barcode component
  misc_feature (33)..(34): n is a, c, g, or t
  misc_feature (43)..(44): n is a, c, g, or t
  misc_feature (53)..(54): n is a, c, g, or t
tttttttaagcagtggtatcaacgcagagtacnnagaatcggnntacaggtcnntttttttttttttttttttttttttttttt

SEQ ID NO: 3446 - DNA, 84 bp, Artificial
  Barcode component
  misc_feature (33)..(34): n is a, c, g, or t
  misc_feature (43)..(44): n is a, c, g, or t
  misc_feature (53)..(54): n is a, c, g, or t
tttttttaagcagtggtatcaacgcagagtacnnagaatcggnnctcacatgnntttttttttttttttttttttttttttttt

SEQ ID NO: 3447 - DNA, 84 bp, Artificial
  Barcode component
  misc_feature (33)..(34): n is a, c, g, or t
  misc_feature (43)..(44): n is a, c, g, or t
  misc_feature (53)..(54): n is a, c, g, or t
tttttttaagcagtggtatcaacgcagagtacnnagaatcggnnactaggagnntttttttttttttttttttttttttttttt

SEQ ID NO: 3448 - DNA, 84 bp, Artificial
  Barcode component
  misc_feature (33)..(34): n is a, c, g, or t
  misc_feature (43)..(44): n is a, c, g, or t
  misc_feature (53)..(54): n is a, c, g, or t
tttttttaagcagtggtatcaacgcagagtacnnagaatcggnnccatagganntttttttttttttttttttttttttttttt

SEQ ID NO: 3449 - DNA, 84 bp, Artificial
  Barcode component
  misc_feature (33)..(34): n is a, c, g, or t
  misc_feature (43)..(44): n is a, c, g, or t
  misc_feature (53)..(54): n is a, c, g, or t
tttttttaagcagtggtatcaacgcagagtacnnagaatcggnnggagaatcnntttttttttttttttttttttttttttttt

SEQ ID NO: 3450 - DNA, 84 bp, Artificial
  Barcode component
  misc_feature (33)..(34): n is a, c, g, or t
  misc_feature (43)..(44): n is a, c, g, or t
  misc_feature (53)..(54): n is a, c, g, or t
tttttttaagcagtggtatcaacgcagagtacnnagaatcggnngccaagaanntttttttttttttttttttttttttttttt

SEQ ID NO: 3451 - DNA, 84 bp, Artificial
  Barcode component
  misc_feature (33)..(34): n is a, c, g, or t
  misc_feature (43)..(44): n is a, c, g, or t
  misc_feature (53)..(54): n is a, c, g, or t
tttttttaagcagtggtatcaacgcagagtacnnagaatcggnnaaggcaagnntttttttttttttttttttttttttttttt

SEQ ID NO: 3452 - DNA, 84 bp, Artificial
  Barcode component
  misc_feature (33)..(34): n is a, c, g, or t
  misc_feature (43)..(44): n is a, c, g, or t
  misc_feature (53)..(54): n is a, c, g, or t
tttttttaagcagtggtatcaacgcagagtacnnagaatcggnnaatgtcgcnntttttttttttttttttttttttttttttt

SEQ ID NO: 3453 - DNA, 84 bp, Artificial
  Barcode component
  misc_feature (33)..(34): n is a, c, g, or t
  misc_feature (43)..(44): n is a, c, g, or t
  misc_feature (53)..(54): n is a, c, g, or t
tttttttaagcagtggtatcaacgcagagtacnnagaatcggnnatggaaccnntttttttttttttttttttttttttttttt

SEQ ID NO: 3454 - DNA, 84 bp, Artificial
  Barcode component
  misc_feature (33)..(34): n is a, c, g, or t
  misc_feature (43)..(44): n is a, c, g, or t
  misc_feature (53)..(54): n is a, c, g, or t
tttttttaagcagtggtatcaacgcagagtacnnagaatcggnnagaggcatnntttttttttttttttttttttttttttttt

SEQ ID NO: 3455 - DNA, 84 bp, Artificial
  Barcode component
  misc_feature (33)..(34): n is a, c, g, or t
  misc_feature (43)..(44): n is a, c, g, or t
  misc_feature (53)..(54): n is a, c, g, or t
tttttttaagcagtggtatcaacgcagagtacnnagaatcggnntgcatagcnntttttttttttttttttttttttttttttt

SEQ ID NO: 3456 - DNA, 84 bp, Artificial
  Barcode component
  misc_feature (33)..(34): n is a, c, g, or t
  misc_feature (43)..(44): n is a, c, g, or t
  misc_feature (53)..(54): n is a, c, g, or t
tttttttaagcagtggtatcaacgcagagtacnnagaatcggnnctaacgganntttttttttttttttttttttttttttttt

SEQ ID NO: 3457 - DNA, 84 bp, Artificial
  Barcode component
  misc_feature (33)..(34): n is a, c, g, or t
  misc_feature (43)..(44): n is a, c, g, or t
  misc_feature (53)..(54): n is a, c, g, or t
tttttttaagcagtggtatcaacgcagagtacnnagaatcggnntatcgaggnntttttttttttttttttttttttttttttt

SEQ ID NO: 3458 - DNA, 84 bp, Artificial
  Barcode component
  misc_feature (33)..(34): n is a, c, g, or t
  misc_feature (43)..(44): n is a, c, g, or t
  misc_feature (53)..(54): n is a, c, g, or t
tttttttaagcagtggtatcaacgcagagtacnnagaatcggnncatagcctnntttttttttttttttttttttttttttttt

SEQ ID NO: 3459 - DNA, 84 bp, Artificial
  Barcode component
  misc_feature (33)..(34): n is a, c, g, or t
  misc_feature (43)..(44): n is a, c, g, or t
  misc_feature (53)..(54): n is a, c, g, or t
tttttttaagcagtggtatcaacgcagagtacnnagaatcggnnatcgagacnntttttttttttttttttttttttttttttt

SEQ ID NO: 3460 - DNA, 84 bp, Artificial
  Barcode component
  misc_feature (33)..(34): n is a, c, g, or t
  misc_feature (43)..(44): n is a, c, g, or t
  misc_feature (53)..(54): n is a, c, g, or t
tttttttaagcagtggtatcaacgcagagtacnnagaatcggnnggaagagtnntttttttttttttttttttttttttttttt

SEQ ID NO: 3461 - DNA, 84 bp, Artificial
  Barcode component
  misc_feature (33)..(34): n is a, c, g, or t
  misc_feature (43)..(44): n is a, c, g, or t
  misc_feature (53)..(54): n is a, c, g, or t
tttttttaagcagtggtatcaacgcagagtacnnagaatcggnnccaagtagnntttttttttttttttttttttttttttttt

SEQ ID NO: 3462 - DNA, 84 bp, Artificial
  Barcode component
  misc_feature (33)..(34): n is a, c, g, or t
  misc_feature (43)..(44): n is a, c, g, or t
  misc_feature (53)..(54): n is a, c, g, or t
tttttttaagcagtggtatcaacgcagagtacnnagaatcggnnctgaacagnntttttttttttttttttttttttttttttt

SEQ ID NO: 3463 - DNA, 84 bp, Artificial
  Barcode component
  misc_feature (33)..(34): n is a, c, g, or t
  misc_feature (43)..(44): n is a, c, g, or t
  misc_feature (53)..(54): n is a, c, g, or t
tttttttaagcagtggtatcaacgcagagtacnnagaatcggnngtaggttcnntttttttttttttttttttttttttttttt

SEQ ID NO: 3464 - DNA, 84 bp, Artificial
  Barcode component
  misc_feature (33)..(34): n is a, c, g, or t
  misc_feature (43)..(44): n is a, c, g, or t
  misc_feature (53)..(54): n is a, c, g, or t
tttttttaagcagtggtatcaacgcagagtacnnagaatcggnngtatggacnntttttttttttttttttttttttttttttt

SEQ ID NO: 3465 - DNA, 84 bp, Artificial
  Barcode component
  misc_feature (33)..(34): n is a, c, g, or t
  misc_feature (43)..(44): n is a, c, g, or t
  misc_feature (53)..(54): n is a, c, g, or t
tttttttaagcagtggtatcaacgcagagtacnnagaatcggnntcgcaacanntttttttttttttttttttttttttttttt

SEQ ID NO: 3466 - DNA, 84 bp, Artificial
  Barcode component
  misc_feature (33)..(34): n is a, c, g, or t
  misc_feature (43)..(44): n is a, c, g, or t
  misc_feature (53)..(54): n is a, c, g, or t
tttttttaagcagtggtatcaacgcagagtacnnagaatcggnnccgctaatnntttttttttttttttttttttttttttttt

SEQ ID NO: 3467 - DNA, 84 bp, Artificial
  Barcode component
  misc_feature (33)..(34): n is a, c, g, or t
  misc_feature (43)..(44): n is a, c, g, or t
  misc_feature (53)..(54): n is a, c, g, or t
tttttttaagcagtggtatcaacgcagagtacnnagaatcggnngattcgcanntttttttttttttttttttttttttttttt

SEQ ID NO: 3468 - DNA, 84 bp, Artificial
  Barcode component
  misc_feature (33)..(34): n is a, c, g, or t
  misc_feature (43)..(44): n is a, c, g, or t
  misc_feature (53)..(54): n is a, c, g, or t
tttttttaagcagtggtatcaacgcagagtacnnagaatcggnncgatggaanntttttttttttttttttttttttttttttt

SEQ ID NO: 3469 - DNA, 84 bp, Artificial
  Barcode component
  misc_feature (33)..(34): n is a, c, g, or t
  misc_feature (43)..(44): n is a, c, g, or t
  misc_feature (53)..(54): n is a, c, g, or t
tttttttaagcagtggtatcaacgcagagtacnnagaatcggnnagcaagganntttttttttttttttttttttttttttttt

SEQ ID NO: 3470 - DNA, 84 bp, Artificial
  Barcode component
  misc_feature (33)..(34): n is a, c, g, or t
  misc_feature (43)..(44): n is a, c, g, or t
  misc_feature (53)..(54): n is a, c, g, or t
tttttttaagcagtggtatcaacgcagagtacnnagaatcggnncgtagcaanntttttttttttttttttttttttttttttt

SEQ ID NO: 3471 - DNA, 84 bp, Artificial
  Barcode component
  misc_feature (33)..(34): n is a, c, g, or t
  misc_feature (43)..(44): n is a, c, g, or t
  misc_feature (53)..(54): n is a, c, g, or t
tttttttaagcagtggtatcaacgcagagtacnnagaatcggnntggcagtanntttttttttttttttttttttttttttttt

SEQ ID NO: 3472 - DNA, 84 bp, Artificial
  Barcode component
  misc_feature (33)..(34): n is a, c, g, or t
  misc_feature (43)..(44): n is a, c, g, or t
  misc_feature (53)..(54): n is a, c, g, or t
tttttttaagcagtggtatcaacgcagagtacnnagaatcggnncggtagttnntttttttttttttttttttttttttttttt

SEQ ID NO: 3473 - DNA, 84 bp, Artificial
  Barcode component
  misc_feature (33)..(34): n is a, c, g, or t
  misc_feature (43)..(44): n is a, c, g, or t
  misc_feature (53)..(54): n is a, c, g, or t
tttttttaagcagtggtatcaacgcagagtacnnagaatcggnntgacttcgnntttttttttttttttttttttttttttttt

SEQ ID NO: 3474 - DNA, 84 bp, Artificial
  Barcode component
  misc_feature (33)..(34): n is a, c, g, or t
  misc_feature (43)..(44): n is a, c, g, or t
  misc_feature (53)..(54): n is a, c, g, or t
tttttttaagcagtggtatcaacgcagagtacnnagaatcggnngagtgcaanntttttttttttttttttttttttttttttt

SEQ ID NO: 3475 - DNA, 84 bp, Artificial
  Barcode component
  misc_feature (33)..(34): n is a, c, g, or t
  misc_feature (43)..(44): n is a, c, g, or t
  misc_feature (53)..(54): n is a, c, g, or t
tttttttaagcagtggtatcaacgcagagtacnnagaatcggnnacggtaacnntttttttttttttttttttttttttttttt

SEQ ID NO: 3476 - DNA, 84 bp, Artificial
  Barcode component
  misc_feature (33)..(34): n is a, c, g, or t
  misc_feature (43)..(44): n is a, c, g, or t
  misc_feature (53)..(54): n is a, c, g, or t
tttttttaagcagtggtatcaacgcagagtacnnagaatcggnnaagtggtgnntttttttttttttttttttttttttttttt

SEQ ID NO: 3477 - DNA, 84 bp, Artificial
  Barcode component
  misc_feature (33)..(34): n is a, c, g, or t
  misc_feature (43)..(44): n is a, c, g, or t
  misc_feature (53)..(54): n is a, c, g, or t
tttttttaagcagtggtatcaacgcagagtacnnagaatcggnnggagacaanntttttttttttttttttttttttttttttt

SEQ ID NO: 3478 - DNA, 84 bp, Artificial
  Barcode component
  misc_feature (33)..(34): n is a, c, g, or t
  misc_feature (43)..(44): n is a, c, g, or t
  misc_feature (53)..(54): n is a, c, g, or t
tttttttaagcagtggtatcaacgcagagtacnnagaatcggnntcaaggacnntttttttttttttttttttttttttttttt

SEQ ID NO: 3479 - DNA, 84 bp, Artificial
  Barcode component
  misc_feature (33)..(34): n is a, c, g, or t
  misc_feature (43)..(44): n is a, c, g, or t
  misc_feature (53)..(54): n is a, c, g, or t
tttttttaagcagtggtatcaacgcagagtacnnagaatcggnnaagagagcnntttttttttttttttttttttttttttttt

SEQ ID NO: 3480 - DNA, 84 bp, Artificial
  Barcode component
  misc_feature (33)..(34): n is a, c, g, or t
  misc_feature (43)..(44): n is a, c, g, or t
  misc_feature (53)..(54): n is a, c, g, or t
tttttttaagcagtggtatcaacgcagagtacnnagaatcggnncgagagatnntttttttttttttttttttttttttttttt

SEQ ID NO: 3481 - DNA, 84 bp, Artificial
  Barcode component
  misc_feature (33)..(34): n is a, c, g, or t
  misc_feature (43)..(44): n is a, c, g, or t
  misc_feature (53)..(54): n is a, c, g, or t
tttttttaagcagtggtatcaacgcagagtacnnagaatcggnnacagatggnntttttttttttttttttttttttttttttt

SEQ ID NO: 3482 - DNA, 84 bp, Artificial
  Barcode component
  misc_feature (33)..(34): n is a, c, g, or t
  misc_feature (43)..(44): n is a, c, g, or t
  misc_feature (53)..(54): n is a, c, g, or t
tttttttaagcagtggtatcaacgcagagtacnnagaatcggnnaggagtcanntttttttttttttttttttttttttttttt

SEQ ID NO: 3483 - DNA, 84 bp, Artificial
  Barcode component
  misc_feature (33)..(34): n is a, c, g, or t
  misc_feature (43)..(44): n is a, c, g, or t
  misc_feature (53)..(54): n is a, c, g, or t
tttttttaagcagtggtatcaacgcagagtacnnagaatcggnncgtgttacnntttttttttttttttttttttttttttttt

SEQ ID NO: 3484 - DNA, 84 bp, Artificial
  Barcode component
  misc_feature (33)..(34): n is a, c, g, or t
  misc_feature (43)..(44): n is a, c, g, or t
  misc_feature (53)..(54): n is a, c, g, or t
tttttttaagcagtggtatcaacgcagagtacnnagaatcggnntagtgtgcnntttttttttttttttttttttttttttttt

SEQ ID NO: 3485 - DNA, 84 bp, Artificial
  Barcode component
  misc_feature (33)..(34): n is a, c, g, or t
  misc_feature (43)..(44): n is a, c, g, or t
  misc_feature (53)..(54): n is a, c, g, or t
tttttttaagcagtggtatcaacgcagagtacnnagaatcggnnctcatgacnntttttttttttttttttttttttttttttt

SEQ ID NO: 3486 - DNA, 84 bp, Artificial
  Barcode component
  misc_feature (33)..(34): n is a, c, g, or t
  misc_feature (43)..(44): n is a, c, g, or t
  misc_feature (53)..(54): n is a, c, g, or t
tttttttaagcagtggtatcaacgcagagtacnnagaatcggnngtatccagnntttttttttttttttttttttttttttttt

SEQ ID NO: 3487 - DNA, 84 bp, Artificial
  Barcode component
  misc_feature (33)..(34): n is a, c, g, or t
  misc_feature (43)..(44): n is a, c, g, or t
  misc_feature (53)..(54): n is a, c, g, or t
tttttttaagcagtggtatcaacgcagagtacnnagaatcggnnacgcctatnntttttttttttttttttttttttttttttt

SEQ ID NO: 3488 - DNA, 84 bp, Artificial
  Barcode component
  misc_feature (33)..(34): n is a, c, g, or t
  misc_feature (43)..(44): n is a, c, g, or t
  misc_feature (53)..(54): n is a, c, g, or t
tttttttaagcagtggtatcaacgcagagtacnnagaatcggnnaacgacctnntttttttttttttttttttttttttttttt

SEQ ID NO: 3489 - DNA, 84 bp, Artificial
  Barcode component
  misc_feature (33)..(34): n is a, c, g, or t
  misc_feature (43)..(44): n is a, c, g, or t
  misc_feature (53)..(54): n is a, c, g, or t
tttttttaagcagtggtatcaacgcagagtacnnagaatcggnnatcaggctnntttttttttttttttttttttttttttttt

SEQ ID NO: 3490 - DNA, 84 bp, Artificial
  Barcode component
  misc_feature (33)..(34): n is a, c, g, or t
  misc_feature (43)..(44): n is a, c, g, or t
  misc_feature (53)..(54): n is a, c, g, or t
tttttttaagcagtggtatcaacgcagagtacnnagaatcggnncaagttcgnntttttttttttttttttttttttttttttt

SEQ ID NO: 3491 - DNA, 84 bp, Artificial
  Barcode component
  misc_feature (33)..(34): n is a, c, g, or t
  misc_feature (43)..(44): n is a, c, g, or t
  misc_feature (53)..(54): n is a, c, g, or t
tttttttaagcagtggtatcaacgcagagtacnnagaatcggnntagccaganntttttttttttttttttttttttttttttt

SEQ ID NO: 3492 - DNA, 84 bp, Artificial
  Barcode component
  misc_feature (33)..(34): n is a, c, g, or t
  misc_feature (43)..(44): n is a, c, g, or t
  misc_feature (53)..(54): n is a, c, g, or t
tttttttaagcagtggtatcaacgcagagtacnnagaatcggnncaatcacgnntttttttttttttttttttttttttttttt

SEQ ID NO: 3493 - DNA, 84 bp, Artificial
  Barcode component
  misc_feature (33)..(34): n is a, c, g, or t
  misc_feature (43)..(44): n is a, c, g, or t
  misc_feature (53)..(54): n is a, c, g, or t
tttttttaagcagtggtatcaacgcagagtacnnagaatcggnngcaacaagnntttttttttttttttttttttttttttttt

SEQ ID NO: 3494 - DNA, 84 bp, Artificial
  Barcode component
  misc_feature (33)..(34): n is a, c, g, or t
  misc_feature (43)..(44): n is a, c, g, or t
  misc_feature (53)..(54): n is a, c, g, or t
tttttttaagcagtggtatcaacgcagagtacnnagaatcggnncacgacaanntttttttttttttttttttttttttttttt

SEQ ID NO: 3495 - DNA, 84 bp, Artificial
  Barcode component
  misc_feature (33)..(34): n is a, c, g, or t
  misc_feature (43)..(44): n is a, c, g, or t
  misc_feature (53)..(54): n is a, c, g, or t
tttttttaagcagtggtatcaacgcagagtacnnagaatcggnntacggaganntttttttttttttttttttttttttttttt

SEQ ID NO: 3496 - DNA, 84 bp, Artificial
  Barcode component
  misc_feature (33)..(34): n is a, c, g, or t
  misc_feature (43)..(44): n is a, c, g, or t
  misc_feature (53)..(54): n is a, c, g, or t
tttttttaagcagtggtatcaacgcagagtacnnagaatcggnncgacaaganntttttttttttttttttttttttttttttt

SEQ ID NO: 3497 - DNA, 84 bp, Artificial
  Barcode component
  misc_feature (33)..(34): n is a, c, g, or t
  misc_feature (43)..(44): n is a, c, g, or t
  misc_feature (53)..(54): n is a, c, g, or t
tttttttaagcagtggtatcaacgcagagtacnnagaatcggnncgaagtganntttttttttttttttttttttttttttttt

SEQ ID NO: 3498 - DNA, 84 bp, Artificial
  Barcode component
  misc_feature (33)..(34): n is a, c, g, or t
  misc_feature (43)..(44): n is a, c, g, or t
  misc_feature (53)..(54): n is a, c, g, or t
tttttttaagcagtggtatcaacgcagagtacnnagaatcggnnagctggtanntttttttttttttttttttttttttttttt

SEQ ID NO: 3499 - DNA, 84 bp, Artificial
  Barcode component
  misc_feature (33)..(34): n is a, c, g, or t
  misc_feature (43)..(44): n is a, c, g, or t
  misc_feature (53)..(54): n is a, c, g, or t
tttttttaagcagtggtatcaacgcagagtacnnagaatcggnnaactaggcnntttttttttttttttttttttttttttttt

SEQ ID NO: 3500 - DNA, 84 bp, Artificial
  Barcode component
  misc_feature (33)..(34): n is a, c, g, or t
  misc_feature (43)..(44): n is a, c, g, or t
  misc_feature (53)..(54): n is a, c, g, or t
tttttttaagcagtggtatcaacgcagagtacnnagaatcggnncagcaagtnntttttttttttttttttttttttttttttt

SEQ ID NO: 3501 - DNA, 84 bp, Artificial
  Barcode component
  misc_feature (33)..(34): n is a, c, g, or t
  misc_feature (43)..(44): n is a, c, g, or t
  misc_feature (53)..(54): n is a, c, g, or t
tttttttaagcagtggtatcaacgcagagtacnnagaatcggnnacgaggtanntttttttttttttttttttttttttttttt

SEQ ID NO: 3502 - DNA, 84 bp, Artificial
  Barcode component
  misc_feature (33)..(34): n is a, c, g, or t
  misc_feature (43)..(44): n is a, c, g, or t
  misc_feature (53)..(54): n is a, c, g, or t
tttttttaagcagtggtatcaacgcagagtacnnagaatcggnncatcttccnntttttttttttttttttttttttttttttt

SEQ ID NO: 3503 - DNA, 84 bp, Artificial
  Barcode component
  misc_feature (33)..(34): n is a, c, g, or t
  misc_feature (43)..(44): n is a, c, g, or t
  misc_feature (53)..(54): n is a, c, g, or t
tttttttaagcagtggtatcaacgcagagtacnnagaatcggnncctgaatcnntttttttttttttttttttttttttttttt

SEQ ID NO: 3504 - DNA, 84 bp, Artificial
  Barcode component
  misc_feature (33)..(34): n is a, c, g, or t
  misc_feature (43)..(44): n is a, c, g, or t
  misc_feature (53)..(54): n is a, c, g, or t
tttttttaagcagtggtatcaacgcagagtacnnagaatcggnntgcagactnntttttttttttttttttttttttttttttt

SEQ ID NO: 3505 - DNA, 84 bp, Artificial
  Barcode component
  misc_feature (33)..(34): n is a, c, g, or t
  misc_feature (43)..(44): n is a, c, g, or t
  misc_feature (53)..(54): n is a, c, g, or t
tttttttaagcagtggtatcaacgcagagtacnnagaatcggnnagatgtggnntttttttttttttttttttttttttttttt

SEQ ID NO: 3506 - DNA, 84 bp, Artificial
  Barcode component
  misc_feature (33)..(34): n is a, c, g, or t
  misc_feature (43)..(44): n is a, c, g, or t
  misc_feature (53)..(54): n is a, c, g, or t
tttttttaagcagtggtatcaacgcagagtacnnagaatcggnnagttcgacnntttttttttttttttttttttttttttttt

SEQ ID NO: 3507 - DNA, 84 bp, Artificial
  Barcode component
  misc_feature (33)..(34): n is a, c, g, or t
  misc_feature (43)..(44): n is a, c, g, or t
  misc_feature (53)..(54): n is a, c, g, or t
tttttttaagcagtggtatcaacgcagagtacnnagaatcggnnacaacctcnntttttttttttttttttttttttttttttt

SEQ ID NO: 3508 - DNA, 84 bp, Artificial
  Barcode component
  misc_feature (33)..(34): n is a, c, g, or t
  misc_feature (43)..(44): n is a, c, g, or t
  misc_feature (53)..(54): n is a, c, g, or t
tttttttaagcagtggtatcaacgcagagtacnnagaatcggnncatggtagnntttttttttttttttttttttttttttttt

SEQ ID NO: 3509 - DNA, 84 bp, Artificial
  Barcode component
  misc_feature (33)..(34): n is a, c, g, or t
  misc_feature (43)..(44): n is a, c, g, or t
  misc_feature (53)..(54): n is a, c, g, or t
tttttttaagcagtggtatcaacgcagagtacnnagaatcggnncgtatctcnntttttttttttttttttttttttttttttt

SEQ ID NO: 3510 - DNA, 84 bp, Artificial
  Barcode component
  misc_feature (33)..(34): n is a, c, g, or t
  misc_feature (43)..(44): n is a, c, g, or t
  misc_feature (53)..(54): n is a, c, g, or t
tttttttaagcagtggtatcaacgcagagtacnnagaatcggnncctagttcnntttttttttttttttttttttttttttttt

SEQ ID NO: 3511 - DNA, 84 bp, Artificial
  Barcode component
  misc_feature (33)..(34): n is a, c, g, or t
  misc_feature (43)..(44): n is a, c, g, or t
  misc_feature (53)..(54): n is a, c, g, or t
tttttttaagcagtggtatcaacgcagagtacnnagaatcggnncaagagtcnntttttttttttttttttttttttttttttt

SEQ ID NO: 3512 - DNA, 84 bp, Artificial
  Barcode component
  misc_feature (33)..(34): n is a, c, g, or t
  misc_feature (43)..(44): n is a, c, g, or t
  misc_feature (53)..(54): n is a, c, g, or t
tttttttaagcagtggtatcaacgcagagtacnnggaatggannaatcggcanntttttttttttttttttttttttttttttt

SEQ ID NO: 3513 - DNA, 84 bp, Artificial
  Barcode component
  misc_feature (33)..(34): n is a, c, g, or t
  misc_feature (43)..(44): n is a, c, g, or t
  misc_feature (53)..(54): n is a, c, g, or t
tttttttaagcagtggtatcaacgcagagtacnnggaatgganntacggcatnntttttttttttttttttttttttttttttt

SEQ ID NO: 3514 - DNA, 84 bp, Artificial
  Barcode component
  misc_feature (33)..(34): n is a, c, g, or t
  misc_feature (43)..(44): n is a, c, g, or t
  misc_feature (53)..(54): n is a, c, g, or t
tttttttaagcagtggtatcaacgcagagtacnnggaatggannttggatcgnntttttttttttttttttttttttttttttt

SEQ ID NO: 3515 - DNA, 84 bp, Artificial
  Barcode component
  misc_feature (33)..(34): n is a, c, g, or t
  misc_feature (43)..(44): n is a, c, g, or t
  misc_feature (53)..(54): n is a, c, g, or t
tttttttaagcagtggtatcaacgcagagtacnnggaatgganntggaacganntttttttttttttttttttttttttttttt

SEQ ID NO: 3516 - DNA, 84 bp, Artificial
  Barcode component
  misc_feature (33)..(34): n is a, c, g, or t
  misc_feature (43)..(44): n is a, c, g, or t
  misc_feature (53)..(54): n is a, c, g, or t
tttttttaagcagtggtatcaacgcagagtacnnggaatggannggcaatcanntttttttttttttttttttttttttttttt

SEQ ID NO: 3517 - DNA, 84 bp, Artificial
  Barcode component
  misc_feature (33)..(34): n is a, c, g, or t
  misc_feature (43)..(44): n is a, c, g, or t
  misc_feature (53)..(54): n is a, c, g, or t
tttttttaagcagtggtatcaacgcagagtacnnggaatgganngaatccganntttttttttttttttttttttttttttttt

SEQ ID NO: 3518 - DNA, 84 bp, Artificial
  Barcode component
  misc_feature (33)..(34): n is a, c, g, or t
  misc_feature (43)..(44): n is a, c, g, or t
  misc_feature (53)..(54): n is a, c, g, or t
tttttttaagcagtggtatcaacgcagagtacnnggaatggannttacggtgnntttttttttttttttttttttttttttttt

SEQ ID NO: 3519 - DNA, 84 bp, Artificial
  Barcode component
  misc_feature (33)..(34): n is a, c, g, or t
  misc_feature (43)..(44): n is a, c, g, or t
  misc_feature (53)..(54): n is a, c, g, or t
tttttttaagcagtggtatcaacgcagagtacnnggaatgganncatatcggnntttttttttttttttttttttttttttttt

SEQ ID NO: 3520 - DNA, 84 bp, Artificial
  Barcode component
  misc_feature (33)..(34): n is a, c, g, or t
  misc_feature (43)..(44): n is a, c, g, or t
  misc_feature (53)..(54): n is a, c, g, or t
tttttttaagcagtggtatcaacgcagagtacnnggaatgganncttcggtanntttttttttttttttttttttttttttttt

SEQ ID NO: 3521 - DNA, 84 bp, Artificial
  Barcode component
  misc_feature (33)..(34): n is a, c, g, or t
  misc_feature (43)..(44): n is a, c, g, or t
  misc_feature (53)..(54): n is a, c, g, or t
tttttttaagcagtggtatcaacgcagagtacnnggaatgganntcctaacgnntttttttttttttttttttttttttttttt

SEQ ID NO: 3522 - DNA, 84 bp, Artificial
  Barcode component
  misc_feature (33)..(34): n is a, c, g, or t
  misc_feature (43)..(44): n is a, c, g, or t
  misc_feature (53)..(54): n is a, c, g, or t
tttttttaagcagtggtatcaacgcagagtacnnggaatgganngtaagccanntttttttttttttttttttttttttttttt

SEQ ID NO: 3523 - DNA, 84 bp, Artificial
  Barcode component
  misc_feature (33)..(34): n is a, c, g, or t
  misc_feature (43)..(44): n is a, c, g, or t
  misc_feature (53)..(54): n is a, c, g, or t
tttttttaagcagtggtatcaacgcagagtacnnggaatgganntaaggtggnntttttttttttttttttttttttttttttt

SEQ ID NO: 3524 - DNA, 84 bp, Artificial
  Barcode component
  misc_feature (33)..(34): n is a, c, g, or t
  misc_feature (43)..(44): n is a, c, g, or t
  misc_feature (53)..(54): n is a, c, g, or t
tttttttaagcagtggtatcaacgcagagtacnnggaatggannggtaagctnntttttttttttttttttttttttttttttt

SEQ ID NO: 3525 - DNA, 84 bp, Artificial
  Barcode component
  misc_feature (33)..(34): n is a, c, g, or t
  misc_feature (43)..(44): n is a, c, g, or t
  misc_feature (53)..(54): n is a, c, g, or t
tttttttaagcagtggtatcaacgcagagtacnnggaatgganntgtgtcganntttttttttttttttttttttttttttttt

SEQ ID NO: 3526 - DNA, 84 bp, Artificial
  Barcode component
  misc_feature (33)..(34): n is a, c, g, or t
  misc_feature (43)..(44): n is a, c, g, or t
  misc_feature (53)..(54): n is a, c, g, or t
tttttttaagcagtggtatcaacgcagagtacnnggaatgganngagcatganntttttttttttttttttttttttttttttt

SEQ ID NO: 3527 - DNA, 84 bp, Artificial
  Barcode component
  misc_feature (33)..(34): n is a, c, g, or t
  misc_feature (43)..(44): n is a, c, g, or t
  misc_feature (53)..(54): n is a, c, g, or t
tttttttaagcagtggtatcaacgcagagtacnnggaatgganntcgaagtcnntttttttttttttttttttttttttttttt

SEQ ID NO: 3528 - DNA, 84 bp, Artificial
  Barcode component
  misc_feature (33)..(34): n is a, c, g, or t
  misc_feature (43)..(44): n is a, c, g, or t
  misc_feature (53)..(54): n is a, c, g, or t
tttttttaagcagtggtatcaacgcagagtacnnggaatggannggtgaacanntttttttttttttttttttttttttttttt

SEQ ID NO: 3529 - DNA, 84 bp, Artificial
  Barcode component
  misc_feature (33)..(34): n is a, c, g, or t
  misc_feature (43)..(44): n is a, c, g, or t
  misc_feature (53)..(54): n is a, c, g, or t
tttttttaagcagtggtatcaacgcagagtacnnggaatggannacatgcacnntttttttttttttttttttttttttttttt

SEQ ID NO: 3530 - DNA, 84 bp, Artificial
  Barcode component
  misc_feature (33)..(34): n is a, c, g, or t
  misc_feature (43)..(44): n is a, c, g, or t
  misc_feature (53)..(54): n is a, c, g, or t
tttttttaagcagtggtatcaacgcagagtacnnggaatggannccaacagtnntttttttttttttttttttttttttttttt

SEQ ID NO: 3531 - DNA, 84 bp, Artificial
  Barcode component
  misc_feature (33)..(34): n is a, c, g, or t
  misc_feature (43)..(44): n is a, c, g, or t
  misc_feature (53)..(54): n is a, c, g, or t
tttttttaagcagtggtatcaacgcagagtacnnggaatggannagaacagcnntttttttttttttttttttttttttttttt

SEQ ID NO: 3532 - DNA, 84 bp, Artificial
  Barcode component
  misc_feature (33)..(34): n is a, c, g, or t
  misc_feature (43)..(44): n is a, c, g, or t
  misc_feature (53)..(54): n is a, c, g, or t
tttttttaagcagtggtatcaacgcagagtacnnggaatgganngaacacgtnntttttttttttttttttttttttttttttt

SEQ ID NO: 3533 - DNA, 84 bp, Artificial
  Barcode component
  misc_feature (33)..(34): n is a, c, g, or t
  misc_feature (43)..(44): n is a, c, g, or t
  misc_feature (53)..(54): n is a, c, g, or t
tttttttaagcagtggtatcaacgcagagtacnnggaatggannggtcttcanntttttttttttttttttttttttttttttt

SEQ ID NO: 3534 - DNA, 84 bp, Artificial
  Barcode component
  misc_feature (33)..(34): n is a, c, g, or t
  misc_feature (43)..(44): n is a, c, g, or t
  misc_feature (53)..(54): n is a, c, g, or t
tttttttaagcagtggtatcaacgcagagtacnnggaatggannaggttcagnntttttttttttttttttttttttttttttt

SEQ ID NO: 3535 - DNA, 84 bp, Artificial
  Barcode component
  misc_feature (33)..(34): n is a, c, g, or t
  misc_feature (43)..(44): n is a, c, g, or t
  misc_feature (53)..(54): n is a, c, g, or t
tttttttaagcagtggtatcaacgcagagtacnnggaatggannctagagcanntttttttttttttttttttttttttttttt

SEQ ID NO: 3536 - DNA, 84 bp, Artificial
  Barcode component
  misc_feature (33)..(34): n is a, c, g, or t
  misc_feature (43)..(44): n is a, c, g, or t
  misc_feature (53)..(54): n is a, c, g, or t
tttttttaagcagtggtatcaacgcagagtacnnggaatgganncttctagcnntttttttttttttttttttttttttttttt

SEQ ID NO: 3537 - DNA, 84 bp, Artificial
  Barcode component
  misc_feature (33)..(34): n is a, c, g, or t
  misc_feature (43)..(44): n is a, c, g, or t
  misc_feature (53)..(54): n is a, c, g, or t
tttttttaagcagtggtatcaacgcagagtacnnggaatgganngagtaacgnntttttttttttttttttttttttttttttt

SEQ ID NO: 3538 - DNA, 84 bp, Artificial
  Barcode component
  misc_feature (33)..(34): n is a, c, g, or t
  misc_feature (43)..(44): n is a, c, g, or t
  misc_feature (53)..(54): n is a, c, g, or t
tttttttaagcagtggtatcaacgcagagtacnnggaatggannctaagaggnntttttttttttttttttttttttttttttt

SEQ ID NO: 3539 - DNA, 84 bp, Artificial
  Barcode component
  misc_feature (33)..(34): n is a, c, g, or t
  misc_feature (43)..(44): n is a, c, g, or t
  misc_feature (53)..(54): n is a, c, g, or t
tttttttaagcagtggtatcaacgcagagtacnnggaatggannacgtgtagnntttttttttttttttttttttttttttttt

SEQ ID NO: 3540 - DNA, 84 bp, Artificial
  Barcode component
  misc_feature (33)..(34): n is a, c, g, or t
  misc_feature (43)..(44): n is a, c, g, or t
  misc_feature (53)..(54): n is a, c, g, or t
tttttttaagcagtggtatcaacgcagagtacnnggaatggannactacaggnntttttttttttttttttttttttttttttt

SEQ ID NO: 3541 - DNA, 84 bp, Artificial
  Barcode component
  misc_feature (33)..(34): n is a, c, g, or t
  misc_feature (43)..(44): n is a, c, g, or t
  misc_feature (53)..(54): n is a, c, g, or t
tttttttaagcagtggtatcaacgcagagtacnnggaatgganntacaggtcnntttttttttttttttttttttttttttttt

SEQ ID NO: 3542 - DNA, 84 bp, Artificial
  Barcode component
  misc_feature (33)..(34): n is a, c, g, or t
  misc_feature (43)..(44): n is a, c, g, or t
  misc_feature (53)..(54): n is a, c, g, or t
tttttttaagcagtggtatcaacgcagagtacnnggaatggannctcacatgnntttttttttttttttttttttttttttttt

SEQ ID NO: 3543 - DNA, 84 bp, Artificial
  Barcode component
  misc_feature (33)..(34): n is a, c, g, or t
  misc_feature (43)..(44): n is a, c, g, or t
  misc_feature (53)..(54): n is a, c, g, or t
tttttttaagcagtggtatcaacgcagagtacnnggaatggannactaggagnntttttttttttttttttttttttttttttt

SEQ ID NO: 3544 - DNA, 84 bp, Artificial
  Barcode component
  misc_feature (33)..(34): n is a, c, g, or t
  misc_feature (43)..(44): n is a, c, g, or t
  misc_feature (53)..(54): n is a, c, g, or t
tttttttaagcagtggtatcaacgcagagtacnnggaatggannccatagganntttttttttttttttttttttttttttttt

SEQ ID NO: 3545 - DNA, 84 bp, Artificial
  Barcode component
  misc_feature (33)..(34): n is a, c, g, or t
  misc_feature (43)..(44): n is a, c, g, or t
  misc_feature (53)..(54): n is a, c, g, or t
tttttttaagcagtggtatcaacgcagagtacnnggaatggannggagaatcnntttttttttttttttttttttttttttttt

SEQ ID NO: 3546 - DNA, 84 bp, Artificial
  Barcode component
  misc_feature (33)..(34): n is a, c, g, or t
  misc_feature (43)..(44): n is a, c, g, or t
  misc_feature (53)..(54): n is a, c, g, or t
tttttttaagcagtggtatcaacgcagagtacnnggaatgganngccaagaanntttttttttttttttttttttttttttttt

SEQ ID NO: 3547 - DNA, 84 bp, Artificial
  Barcode component
  misc_feature (33)..(34): n is a, c, g, or t
  misc_feature (43)..(44): n is a, c, g, or t
  misc_feature (53)..(54): n is a, c, g, or t
tttttttaagcagtggtatcaacgcagagtacnnggaatggannaaggcaagnntttttttttttttttttttttttttttttt

SEQ ID NO: 3548 - DNA, 84 bp, Artificial
  Barcode component
  misc_feature (33)..(34): n is a, c, g, or t
  misc_feature (43)..(44): n is a, c, g, or t
  misc_feature (53)..(54): n is a, c, g, or t
tttttttaagcagtggtatcaacgcagagtacnnggaatggannaatgtcgcnntttttttttttttttttttttttttttttt

SEQ ID NO: 3549 - DNA, 84 bp, Artificial
  Barcode component
  misc_feature (33)..(34): n is a, c, g, or t
  misc_feature (43)..(44): n is a, c, g, or t
  misc_feature (53)..(54): n is a, c, g, or t
tttttttaagcagtggtatcaacgcagagtacnnggaatggannatggaaccnntttttttttttttttttttttttttttttt

SEQ ID NO: 3550 - DNA, 84 bp, Artificial
  Barcode component
  misc_feature (33)..(34): n is a, c, g, or t
  misc_feature (43)..(44): n is a, c, g, or t
  misc_feature (53)..(54): n is a, c, g, or t
tttttttaagcagtggtatcaacgcagagtacnnggaatggannagaggcatnntttttttttttttttttttttttttttttt

SEQ ID NO: 3551 - DNA, 84 bp, Artificial
  Barcode component
  misc_feature (33)..(34): n is a, c, g, or t
  misc_feature (43)..(44): n is a, c, g, or t
  misc_feature (53)..(54): n is a, c, g, or t
tttttttaagcagtggtatcaacgcagagtacnnggaatgganntgcatagcnntttttttttttttttttttttttttttttt

SEQ ID NO: 3552 - DNA, 84 bp, Artificial
  Barcode component
  misc_feature (33)..(34): n is a, c, g, or t
  misc_feature (43)..(44): n is a, c, g, or t
  misc_feature (53)..(54): n is a, c, g, or t
tttttttaagcagtggtatcaacgcagagtacnnggaatggannctaacgganntttttttttttttttttttttttttttttt

SEQ ID NO: 3553 - DNA, 84 bp, Artificial
  Barcode component
  misc_feature (33)..(34): n is a, c, g, or t
  misc_feature (43)..(44): n is a, c, g, or t
  misc_feature (53)..(54): n is a, c, g, or t
tttttttaagcagtggtatcaacgcagagtacnnggaatgganntatcgaggnntttttttttttttttttttttttttttttt

SEQ ID NO: 3554 - DNA, 84 bp, Artificial
  Barcode component
  misc_feature (33)..(34): n is a, c, g, or t
  misc_feature (43)..(44): n is a, c, g, or t
  misc_feature (53)..(54): n is a, c, g, or t
tttttttaagcagtggtatcaacgcagagtacnnggaatgganncatagcctnntttttttttttttttttttttttttttttt

SEQ ID NO: 3555 - DNA, 84 bp, Artificial
  Barcode component
  misc_feature (33)..(34): n is a, c, g, or t
  misc_feature (43)..(44): n is a, c, g, or t
  misc_feature (53)..(54): n is a, c, g, or t
tttttttaagcagtggtatcaacgcagagtacnnggaatggannatcgagacnntttttttttttttttttttttttttttttt

SEQ ID NO: 3556 - DNA, 84 bp, Artificial
  Barcode component
  misc_feature (33)..(34): n is a, c, g, or t
  misc_feature (43)..(44): n is a, c, g, or t
  misc_feature (53)..(54): n is a, c, g, or t
tttttttaagcagtggtatcaacgcagagtacnnggaatggannggaagagtnntttttttttttttttttttttttttttttt

SEQ ID NO: 3557 - DNA, 84 bp, Artificial
  Barcode component
  misc_feature (33)..(34): n is a, c, g, or t
  misc_feature (43)..(44): n is a, c, g, or t
  misc_feature (53)..(54): n is a, c, g, or t
tttttttaagcagtggtatcaacgcagagtacnnggaatggannccaagtagnntttttttttttttttttttttttttttttt

SEQ ID NO: 3558 - DNA, 84 bp, Artificial
  Barcode component
  misc_feature (33)..(34): n is a, c, g, or t
  misc_feature (43)..(44): n is a, c, g, or t
  misc_feature (53)..(54): n is a, c, g, or t
tttttttaagcagtggtatcaacgcagagtacnnggaatggannctgaacagnntttttttttttttttttttttttttttttt

SEQ ID NO: 3559 - DNA, 84 bp, Artificial
  Barcode component
  misc_feature (33)..(34): n is a, c, g, or t
  misc_feature (43)..(44): n is a, c, g, or t
  misc_feature (53)..(54): n is a, c, g, or t
tttttttaagcagtggtatcaacgcagagtacnnggaatgganngtaggttcnntttttttttttttttttttttttttttttt

SEQ ID NO: 3560 - DNA, 84 bp, Artificial
  Barcode component
  misc_feature (33)..(34): n is a, c, g, or t
  misc_feature (43)..(44): n is a, c, g, or t
  misc_feature (53)..(54): n is a, c, g, or t
tttttttaagcagtggtatcaacgcagagtacnnggaatgganngtatggacnntttttttttttttttttttttttttttttt

SEQ ID NO: 3561 - DNA, 84 bp, Artificial
  Barcode component
  misc_feature (33)..(34): n is a, c, g, or t
  misc_feature (43)..(44): n is a, c, g, or t
  misc_feature (53)..(54): n is a, c, g, or t
tttttttaagcagtggtatcaacgcagagtacnnggaatgganntcgcaacanntttttttttttttttttttttttttttttt

SEQ ID NO: 3562 - DNA, 84 bp, Artificial
  Barcode component
  misc_feature (33)..(34): n is a, c, g, or t
  misc_feature (43)..(44): n is a, c, g, or t
  misc_feature (53)..(54): n is a, c, g, or t
tttttttaagcagtggtatcaacgcagagtacnnggaatggannccgctaatnntttttttttttttttttttttttttttttt

SEQ ID NO: 3563 - DNA, 84 bp, Artificial
  Barcode component
  misc_feature (33)..(34): n is a, c, g, or t
  misc_feature (43)..(44): n is a, c, g, or t
  misc_feature (53)..(54): n is a, c, g, or t
tttttttaagcagtggtatcaacgcagagtacnnggaatgganngattcgcanntttttttttttttttttttttttttttttt

SEQ ID NO: 3564 - DNA, 84 bp, Artificial
  Barcode component
  misc_feature (33)..(34): n is a, c, g, or t
  misc_feature (43)..(44): n is a, c, g, or t
  misc_feature (53)..(54): n is a, c, g, or t
tttttttaagcagtggtatcaacgcagagtacnnggaatgganncgatggaanntttttttttttttttttttttttttttttt

SEQ ID NO: 3565 - DNA, 84 bp, Artificial
  Barcode component
  misc_feature (33)..(34): n is a, c, g, or t
  misc_feature (43)..(44): n is a, c, g, or t
  misc_feature (53)..(54): n is a, c, g, or t
tttttttaagcagtggtatcaacgcagagtacnnggaatggannagcaagganntttttttttttttttttttttttttttttt

SEQ ID NO: 3566 - DNA, 84 bp, Artificial
  Barcode component
  misc_feature (33)..(34): n is a, c, g, or t
  misc_feature (43)..(44): n is a, c, g, or t
  misc_feature (53)..(54): n is a, c, g, or t
tttttttaagcagtggtatcaacgcagagtacnnggaatgganncgtagcaanntttttttttttttttttttttttttttttt

SEQ ID NO: 3567 - DNA, 84 bp, Artificial
  Barcode component
  misc_feature (33)..(34): n is a, c, g, or t
  misc_feature (43)..(44): n is a, c, g, or t
  misc_feature (53)..(54): n is a, c, g, or t
tttttttaagcagtggtatcaacgcagagtacnnggaatgganntggcagtanntttttttttttttttttttttttttttttt

SEQ ID NO: 3568 - DNA, 84 bp, Artificial
  Barcode component
  misc_feature (33)..(34): n is a, c, g, or t
  misc_feature (43)..(44): n is a, c, g, or t
  misc_feature (53)..(54): n is a, c, g, or t
tttttttaagcagtggtatcaacgcagagtacnnggaatgganncggtagttnntttttttttttttttttttttttttttttt

SEQ ID NO: 3569 - DNA, 84 bp, Artificial
  Barcode component
  misc_feature (33)..(34): n is a, c, g, or t
  misc_feature (43)..(44): n is a, c, g, or t
  misc_feature (53)..(54): n is a, c, g, or t
tttttttaagcagtggtatcaacgcagagtacnnggaatgganntgacttcgnntttttttttttttttttttttttttttttt

SEQ ID NO: 3570 - DNA, 84 bp, Artificial
  Barcode component
  misc_feature (33)..(34): n is a, c, g, or t
  misc_feature (43)..(44): n is a, c, g, or t
  misc_feature (53)..(54): n is a, c, g, or t
tttttttaagcagtggtatcaacgcagagtacnnggaatgganngagtgcaanntttttttttttttttttttttttttttttt

SEQ ID NO: 3571 - DNA, 84 bp, Artificial
  Barcode component
  misc_feature (33)..(34): n is a, c, g, or t
  misc_feature (43)..(44): n is a, c, g, or t
  misc_feature (53)..(54): n is a, c, g, or t
tttttttaagcagtggtatcaacgcagagtacnnggaatggannacggtaacnntttttttttttttttttttttttttttttt

SEQ ID NO: 3572 - DNA, 84 bp, Artificial
  Barcode component
  misc_feature (33)..(34): n is a, c, g, or t
  misc_feature (43)..(44): n is a, c, g, or t
  misc_feature (53)..(54): n is a, c, g, or t
tttttttaagcagtggtatcaacgcagagtacnnggaatggannaagtggtgnntttttttttttttttttttttttttttttt

SEQ ID NO: 3573 - DNA, 84 bp, Artificial
  Barcode component
  misc_feature (33)..(34): n is a, c, g, or t
  misc_feature (43)..(44): n is a, c, g, or t
  misc_feature (53)..(54): n is a, c, g, or t
tttttttaagcagtggtatcaacgcagagtacnnggaatggannggagacaanntttttttttttttttttttttttttttttt

SEQ ID NO: 3574 - DNA, 84 bp, Artificial
  Barcode component
  misc_feature (33)..(34): n is a, c, g, or t
  misc_feature (43)..(44): n is a, c, g, or t
  misc_feature (53)..(54): n is a, c, g, or t
tttttttaagcagtggtatcaacgcagagtacnnggaatgganntcaaggacnntttttttttttttttttttttttttttttt

SEQ ID NO: 3575 - DNA, 84 bp, Artificial
  Barcode component
  misc_feature (33)..(34): n is a, c, g, or t
  misc_feature (43)..(44): n is a, c, g, or t
  misc_feature (53)..(54): n is a, c, g, or t
tttttttaagcagtggtatcaacgcagagtacnnggaatggannaagagagcnntttttttttttttttttttttttttttttt

SEQ ID NO: 3576 - DNA, 84 bp, Artificial
  Barcode component
  misc_feature (33)..(34): n is a, c, g, or t
  misc_feature (43)..(44): n is a, c, g, or t
  misc_feature (53)..(54): n is a, c, g, or t
tttttttaagcagtggtatcaacgcagagtacnnggaatgganncgagagatnntttttttttttttttttttttttttttttt

SEQ ID NO: 3577 - DNA, 84 bp, Artificial
  Barcode component
  misc_feature (33)..(34): n is a, c, g, or t
  misc_feature (43)..(44): n is a, c, g, or t
  misc_feature (53)..(54): n is a, c, g, or t
tttttttaagcagtggtatcaacgcagagtacnnggaatggannacagatggnntttttttttttttttttttttttttttttt

SEQ ID NO: 3578 - DNA, 84 bp, Artificial
  Barcode component
  misc_feature (33)..(34): n is a, c, g, or t
  misc_feature (43)..(44): n is a, c, g, or t
  misc_feature (53)..(54): n is a, c, g, or t
tttttttaagcagtggtatcaacgcagagtacnnggaatggannaggagtcanntttttttttttttttttttttttttttttt

SEQ ID NO: 3579 - DNA, 84 bp, Artificial
  Barcode component
  misc_feature (33)..(34): n is a, c, g, or t
  misc_feature (43)..(44): n is a, c, g, or t
  misc_feature (53)..(54): n is a, c, g, or t
tttttttaagcagtggtatcaacgcagagtacnnggaatgganncgtgttacnntttttttttttttttttttttttttttttt

SEQ ID NO: 3580 - DNA, 84 bp, Artificial
  Barcode component
  misc_feature (33)..(34): n is a, c, g, or t
  misc_feature (43)..(44): n is a, c, g, or t
  misc_feature (53)..(54): n is a, c, g, or t
tttttttaagcagtggtatcaacgcagagtacnnggaatgganntagtgtgcnntttttttttttttttttttttttttttttt

SEQ ID NO: 3581 - DNA, 84 bp, Artificial
  Barcode component
  misc_feature (33)..(34): n is a, c, g, or t
  misc_feature (43)..(44): n is a, c, g, or t
  misc_feature (53)..(54): n is a, c, g, or t
tttttttaagcagtggtatcaacgcagagtacnnggaatggannctcatgacnntttttttttttttttttttttttttttttt

SEQ ID NO: 3582 - DNA, 84 bp, Artificial
  Barcode component
  misc_feature (33)..(34): n is a, c, g, or t
  misc_feature (43)..(44): n is a, c, g, or t
  misc_feature (53)..(54): n is a, c, g, or t
tttttttaagcagtggtatcaacgcagagtacnnggaatgganngtatccagnntttttttttttttttttttttttttttttt

SEQ ID NO: 3583 - DNA, 84 bp, Artificial
  Barcode component
  misc_feature (33)..(34): n is a, c, g, or t
  misc_feature (43)..(44): n is a, c, g, or t
  misc_feature (53)..(54): n is a, c, g, or t
tttttttaagcagtggtatcaacgcagagtacnnggaatggannacgcctatnntttttttttttttttttttttttttttttt

SEQ ID NO: 3584 - DNA, 84 bp, Artificial
  Barcode component
  misc_feature (33)..(34): n is a, c, g, or t
  misc_feature (43)..(44): n is a, c, g, or t
  misc_feature (53)..(54): n is a, c, g, or t
tttttttaagcagtggtatcaacgcagagtacnnggaatggannaacgacctnntttttttttttttttttttttttttttttt

SEQ ID NO: 3585 - DNA, 84 bp, Artificial
  Barcode component
  misc_feature (33)..(34): n is a, c, g, or t
  misc_feature (43)..(44): n is a, c, g, or t
  misc_feature (53)..(54): n is a, c, g, or t
tttttttaagcagtggtatcaacgcagagtacnnggaatggannatcaggctnntttttttttttttttttttttttttttttt

SEQ ID NO: 3586 - DNA, 84 bp, Artificial
  Barcode component
  misc_feature (33)..(34): n is a, c, g, or t
  misc_feature (43)..(44): n is a, c, g, or t
  misc_feature (53)..(54): n is a, c, g, or t
tttttttaagcagtggtatcaacgcagagtacnnggaatgganncaagttcgnntttttttttttttttttttttttttttttt

SEQ ID NO: 3587 - DNA, 84 bp, Artificial
  Barcode component
  misc_feature (33)..(34): n is a, c, g, or t
  misc_feature (43)..(44): n is a, c, g, or t
  misc_feature (53)..(54): n is a, c, g, or t
tttttttaagcagtggtatcaacgcagagtacnnggaatgganntagccaganntttttttttttttttttttttttttttttt

SEQ ID NO: 3588 - DNA, 84 bp, Artificial
  Barcode component
  misc_feature (33)..(34): n is a, c, g, or t
  misc_feature (43)..(44): n is a, c, g, or t
  misc_feature (53)..(54): n is a, c, g, or t
tttttttaagcagtggtatcaacgcagagtacnnggaatgganncaatcacgnntttttttttttttttttttttttttttttt

SEQ ID NO: 3589 - DNA, 84 bp, Artificial
  Barcode component
  misc_feature (33)..(34): n is a, c, g, or t
  misc_feature (43)..(44): n is a, c, g, or t
  misc_feature (53)..(54): n is a, c, g, or t
tttttttaagcagtggtatcaacgcagagtacnnggaatgganngcaacaagnntttttttttttttttttttttttttttttt

SEQ ID NO: 3590 - DNA, 84 bp, Artificial
  Barcode component
  misc_feature (33)..(34): n is a, c, g, or t
  misc_feature (43)..(44): n is a, c, g, or t
  misc_feature (53)..(54): n is a, c, g, or t
tttttttaagcagtggtatcaacgcagagtacnnggaatgganncacgacaanntttttttttttttttttttttttttttttt

SEQ ID NO: 3591 - DNA, 84 bp, Artificial
  Barcode component
  misc_feature (33)..(34): n is a, c, g, or t
  misc_feature (43)..(44): n is a, c, g, or t
  misc_feature (53)..(54): n is a, c, g, or t
tttttttaagcagtggtatcaacgcagagtacnnggaatgganntacggaganntttttttttttttttttttttttttttttt

SEQ ID NO: 3592 - DNA, 84 bp, Artificial
  Barcode component
  misc_feature (33)..(34): n is a, c, g, or t
  misc_feature (43)..(44): n is a, c, g, or t
  misc_feature (53)..(54): n is a, c, g, or t
tttttttaagcagtggtatcaacgcagagtacnnggaatgganncgacaaganntttttttttttttttttttttttttttttt

SEQ ID NO: 3593 - DNA, 84 bp, Artificial
  Barcode component
  misc_feature (33)..(34): n is a, c, g, or t
  misc_feature (43)..(44): n is a, c, g, or t
  misc_feature (53)..(54): n is a, c, g, or t
tttttttaagcagtggtatcaacgcagagtacnnggaatgganncgaagtganntttttttttttttttttttttttttttttt

SEQ ID NO: 3594 - DNA, 84 bp, Artificial
  Barcode component
  misc_feature (33)..(34): n is a, c, g, or t
  misc_feature (43)..(44): n is a, c, g, or t
  misc_feature (53)..(54): n is a, c, g, or t
tttttttaagcagtggtatcaacgcagagtacnnggaatggannagctggtanntttttttttttttttttttttttttttttt

SEQ ID NO: 3595 - DNA, 84 bp, Artificial
  Barcode component
  misc_feature (33)..(34): n is a, c, g, or t
  misc_feature (43)..(44): n is a, c, g, or t
  misc_feature (53)..(54): n is a, c, g, or t
tttttttaagcagtggtatcaacgcagagtacnnggaatggannaactaggcnntttttttttttttttttttttttttttttt

SEQ ID NO: 3596 - DNA, 84 bp, Artificial
  Barcode component
  misc_feature (33)..(34): n is a, c, g, or t
  misc_feature (43)..(44): n is a, c, g, or t
  misc_feature (53)..(54): n is a, c, g, or t
tttttttaagcagtggtatcaacgcagagtacnnggaatgganncagcaagtnntttttttttttttttttttttttttttttt

SEQ ID NO: 3597 - DNA, 84 bp, Artificial
  Barcode component
  misc_feature (33)..(34): n is a, c, g, or t
  misc_feature (43)..(44): n is a, c, g, or t
  misc_feature (53)..(54): n is a, c, g, or t
tttttttaagcagtggtatcaacgcagagtacnnggaatggannacgaggtanntttttttttttttttttttttttttttttt

SEQ ID NO: 3598 - DNA, 84 bp, Artificial
  Barcode component
  misc_feature (33)..(34): n is a, c, g, or t
  misc_feature (43)..(44): n is a, c, g, or t
  misc_feature (53)..(54): n is a, c, g, or t
tttttttaagcagtggtatcaacgcagagtacnnggaatgganncatcttccnntttttttttttttttttttttttttttttt

SEQ ID NO: 3599 - DNA, 84 bp, Artificial
  Barcode component
  misc_feature (33)..(34): n is a, c, g, or t
  misc_feature (43)..(44): n is a, c, g, or t
  misc_feature (53)..(54): n is a, c, g, or t
tttttttaagcagtggtatcaacgcagagtacnnggaatgganncctgaatcnntttttttttttttttttttttttttttttt

SEQ ID NO: 3600 - DNA, 84 bp, Artificial
  Barcode component
  misc_feature (33)..(34): n is a, c, g, or t
  misc_feature (43)..(44): n is a, c, g, or t
  misc_feature (53)..(54): n is a, c, g, or t
tttttttaagcagtggtatcaacgcagagtacnnggaatgganntgcagactnntttttttttttttttttttttttttttttt

SEQ ID NO: 3601 - DNA, 84 bp, Artificial
  Barcode component
  misc_feature (33)..(34): n is a, c, g, or t
  misc_feature (43)..(44): n is a, c, g, or t
  misc_feature (53)..(54): n is a, c, g, or t
tttttttaagcagtggtatcaacgcagagtacnnggaatggannagatgtggnntttttttttttttttttttttttttttttt

SEQ ID NO: 3602 - DNA, 84 bp, Artificial
  Barcode component
  misc_feature (33)..(34): n is a, c, g, or t
  misc_feature (43)..(44): n is a, c, g, or t
  misc_feature (53)..(54): n is a, c, g, or t
tttttttaagcagtggtatcaacgcagagtacnnggaatggannagttcgacnntttttttttttttttttttttttttttttt

SEQ ID NO: 3603 - DNA, 84 bp, Artificial
  Barcode component
  misc_feature (33)..(34): n is a, c, g, or t
  misc_feature (43)..(44): n is a, c, g, or t
  misc_feature (53)..(54): n is a, c, g, or t
tttttttaagcagtggtatcaacgcagagtacnnggaatggannacaacctcnntttttttttttttttttttttttttttttt

SEQ ID NO: 3604 - DNA, 84 bp, Artificial
  Barcode component
  misc_feature (33)..(34): n is a, c, g, or t
  misc_feature (43)..(44): n is a, c, g, or t
  misc_feature (53)..(54): n is a, c, g, or t
tttttttaagcagtggtatcaacgcagagtacnnggaatgganncatggtagnntttttttttttttttttttttttttttttt

SEQ ID NO: 3605 - DNA, 84 bp, Artificial
  Barcode component
  misc_feature (33)..(34): n is a, c, g, or t
  misc_feature (43)..(44): n is a, c, g, or t
  misc_feature (53)..(54): n is a, c, g, or t
tttttttaagcagtggtatcaacgcagagtacnnggaatgganncgtatctcnntttttttttttttttttttttttttttttt

SEQ ID NO: 3606 - DNA, 84 bp, Artificial
  Barcode component
  misc_feature (33)..(34): n is a, c, g, or t
  misc_feature (43)..(44): n is a, c, g, or t
  misc_feature (53)..(54): n is a, c, g, or t
tttttttaagcagtggtatcaacgcagagtacnnggaatgganncctagttcnntttttttttttttttttttttttttttttt

SEQ ID NO: 3607 - DNA, 84 bp, Artificial
  Barcode component
  misc_feature (33)..(34): n is a, c, g, or t
  misc_feature (43)..(44): n is a, c, g, or t
  misc_feature (53)..(54): n is a, c, g, or t
tttttttaagcagtggtatcaacgcagagtacnnggaatgganncaagagtcnntttttttttttttttttttttttttttttt

SEQ ID NO: 3608 - DNA, 84 bp, Artificial
  Barcode component
  misc_feature (33)..(34): n is a, c, g, or t
  misc_feature (43)..(44): n is a, c, g, or t
  misc_feature (53)..(54): n is a, c, g, or t
tttttttaagcagtggtatcaacgcagagtacnnccgtattgnnaatcggcanntttttttttttttttttttttttttttttt

SEQ ID NO: 3609 - DNA, 84 bp, Artificial
  Barcode component
  misc_feature (33)..(34): n is a, c, g, or t
  misc_feature (43)..(44): n is a, c, g, or t
  misc_feature (53)..(54): n is a, c, g, or t
tttttttaagcagtggtatcaacgcagagtacnnccgtattgnntacggcatnntttttttttttttttttttttttttttttt

SEQ ID NO: 3610 - DNA, 84 bp, Artificial
  Barcode component
  misc_feature (33)..(34): n is a, c, g, or t
  misc_feature (43)..(44): n is a, c, g, or t
  misc_feature (53)..(54): n is a, c, g, or t
tttttttaagcagtggtatcaacgcagagtacnnccgtattgnnttggatcgnntttttttttttttttttttttttttttttt

SEQ ID NO: 3611 - DNA, 84 bp, Artificial
  Barcode component
  misc_feature (33)..(34): n is a, c, g, or t
  misc_feature (43)..(44): n is a, c, g, or t
  misc_feature (53)..(54): n is a, c, g, or t
tttttttaagcagtggtatcaacgcagagtacnnccgtattgnntggaacganntttttttttttttttttttttttttttttt

SEQ ID NO: 3612 - DNA, 84 bp, Artificial
  Barcode component
  misc_feature (33)..(34): n is a, c, g, or t
  misc_feature (43)..(44): n is a, c, g, or t
  misc_feature (53)..(54): n is a, c, g, or t
tttttttaagcagtggtatcaacgcagagtacnnccgtattgnnggcaatcanntttttttttttttttttttttttttttttt

SEQ ID NO: 3613 - DNA, 84 bp, Artificial
  Barcode component
  misc_feature (33)..(34): n is a, c, g, or t
  misc_feature (43)..(44): n is a, c, g, or t
  misc_feature (53)..(54): n is a, c, g, or t
tttttttaagcagtggtatcaacgcagagtacnnccgtattgnngaatccganntttttttttttttttttttttttttttttt

SEQ ID NO: 3614 - DNA, 84 bp, Artificial
  Barcode component
  misc_feature (33)..(34): n is a, c, g, or t
  misc_feature (43)..(44): n is a, c, g, or t
  misc_feature (53)..(54): n is a, c, g, or t
tttttttaagcagtggtatcaacgcagagtacnnccgtattgnnttacggtgnntttttttttttttttttttttttttttttt

SEQ ID NO: 3615 - DNA, 84 bp, Artificial
  Barcode component
  misc_feature (33)..(34): n is a, c, g, or t
  misc_feature (43)..(44): n is a, c, g, or t
  misc_feature (53)..(54): n is a, c, g, or t
tttttttaagcagtggtatcaacgcagagtacnnccgtattgnncatatcggnntttttttttttttttttttttttttttttt

SEQ ID NO: 3616 - DNA, 84 bp, Artificial
  Barcode component
  misc_feature (33)..(34): n is a, c, g, or t
  misc_feature (43)..(44): n is a, c, g, or t
  misc_feature (53)..(54): n is a, c, g, or t
tttttttaagcagtggtatcaacgcagagtacnnccgtattgnncttcggtanntttttttttttttttttttttttttttttt

SEQ ID NO: 3617 - DNA, 84 bp, Artificial
  Barcode component
  misc_feature (33)..(34): n is a, c, g, or t
  misc_feature (43)..(44): n is a, c, g, or t
  misc_feature (53)..(54): n is a, c, g, or t
tttttttaagcagtggtatcaacgcagagtacnnccgtattgnntcctaacgnntttttttttttttttttttttttttttttt

SEQ ID NO: 3618 - DNA, 84 bp, Artificial
  Barcode component
  misc_feature (33)..(34): n is a, c, g, or t
  misc_feature (43)..(44): n is a, c, g, or t
  misc_feature (53)..(54): n is a, c, g, or t
tttttttaagcagtggtatcaacgcagagtacnnccgtattgnngtaagccanntttttttttttttttttttttttttttttt

SEQ ID NO: 3619 - DNA, 84 bp, Artificial
  Barcode component
  misc_feature (33)..(34): n is a, c, g, or t
  misc_feature (43)..(44): n is a, c, g, or t
  misc_feature (53)..(54): n is a, c, g, or t
tttttttaagcagtggtatcaacgcagagtacnnccgtattgnntaaggtggnntttttttttttttttttttttttttttttt

SEQ ID NO: 3620 - DNA, 84 bp, Artificial
  Barcode component
  misc_feature (33)..(34): n is a, c, g, or t
  misc_feature (43)..(44): n is a, c, g, or t
  misc_feature (53)..(54): n is a, c, g, or t
tttttttaagcagtggtatcaacgcagagtacnnccgtattgnnggtaagctnntttttttttttttttttttttttttttttt

SEQ ID NO: 3621 - DNA, 84 bp, Artificial
  Barcode component
  misc_feature (33)..(34): n is a, c, g, or t
  misc_feature (43)..(44): n is a, c, g, or t
  misc_feature (53)..(54): n is a, c, g, or t
tttttttaagcagtggtatcaacgcagagtacnnccgtattgnntgtgtcganntttttttttttttttttttttttttttttt

SEQ ID NO: 3622 - DNA, 84 bp, Artificial
  Barcode component
  misc_feature (33)..(34): n is a, c, g, or t
  misc_feature (43)..(44): n is a, c, g, or t
  misc_feature (53)..(54): n is a, c, g, or t
tttttttaagcagtggtatcaacgcagagtacnnccgtattgnngagcatganntttttttttttttttttttttttttttttt

SEQ ID NO: 3623 - DNA, 84 bp, Artificial
  Barcode component
  misc_feature (33)..(34): n is a, c, g, or t
  misc_feature (43)..(44): n is a, c, g, or t
  misc_feature (53)..(54): n is a, c, g, or t
tttttttaagcagtggtatcaacgcagagtacnnccgtattgnntcgaagtcnntttttttttttttttttttttttttttttt

SEQ ID NO: 3624 - DNA, 84 bp, Artificial
  Barcode component
  misc_feature (33)..(34): n is a, c, g, or t
  misc_feature (43)..(44): n is a, c, g, or t
  misc_feature (53)..(54): n is a, c, g, or t
tttttttaagcagtggtatcaacgcagagtacnnccgtattgnnggtgaacanntttttttttttttttttttttttttttttt

SEQ ID NO: 3625 - DNA, 84 bp, Artificial
  Barcode component
  misc_feature (33)..(34): n is a, c, g, or t
  misc_feature (43)..(44): n is a, c, g, or t
  misc_feature (53)..(54): n is a, c, g, or t
tttttttaagcagtggtatcaacgcagagtacnnccgtattgnnacatgcacnntttttttttttttttttttttttttttttt

SEQ ID NO: 3626 - DNA, 84 bp, Artificial
  Barcode component
  misc_feature (33)..(34): n is a, c, g, or t
  misc_feature (43)..(44): n is a, c, g, or t
  misc_feature (53)..(54): n is a, c, g, or t
tttttttaagcagtggtatcaacgcagagtacnnccgtattgnnccaacagtnntttttttttttttttttttttttttttttt

SEQ ID NO: 3627 - DNA, 84 bp, Artificial
  Barcode component
  misc_feature (33)..(34): n is a, c, g, or t
  misc_feature (43)..(44): n is a, c, g, or t
  misc_feature (53)..(54): n is a, c, g, or t
tttttttaagcagtggtatcaacgcagagtacnnccgtattgnnagaacagcnntttttttttttttttttttttttttttttt

SEQ ID NO: 3628 - DNA, 84 bp, Artificial
  Barcode component
  misc_feature (33)..(34): n is a, c, g, or t
  misc_feature (43)..(44): n is a, c, g, or t
  misc_feature (53)..(54): n is a, c, g, or t
tttttttaagcagtggtatcaacgcagagtacnnccgtattgnngaacacgtnntttttttttttttttttttttttttttttt

SEQ ID NO: 3629 - DNA, 84 bp, Artificial
  Barcode component
  misc_feature (33)..(34): n is a, c, g, or t
  misc_feature (43)..(44): n is a, c, g, or t
  misc_feature (53)..(54): n is a, c, g, or t
tttttttaagcagtggtatcaacgcagagtacnnccgtattgnnggtcttcanntttttttttttttttttttttttttttttt

SEQ ID NO: 3630 - DNA, 84 bp, Artificial
  Barcode component
  misc_feature (33)..(34): n is a, c, g, or t
  misc_feature (43)..(44): n is a, c, g, or t
  misc_feature (53)..(54): n is a, c, g, or t
tttttttaagcagtggtatcaacgcagagtacnnccgtattgnnaggttcagnntttttttttttttttttttttttttttttt

SEQ ID NO: 3631 - DNA, 84 bp, Artificial
  Barcode component
  misc_feature (33)..(34): n is a, c, g, or t
  misc_feature (43)..(44): n is a, c, g, or t
  misc_feature (53)..(54): n is a, c, g, or t
tttttttaagcagtggtatcaacgcagagtacnnccgtattgnnctagagcanntttttttttttttttttttttttttttttt

SEQ ID NO: 3632 - DNA, 84 bp, Artificial
  Barcode component
  misc_feature (33)..(34): n is a, c, g, or t
  misc_feature (43)..(44): n is a, c, g, or t
  misc_feature (53)..(54): n is a, c, g, or t
tttttttaagcagtggtatcaacgcagagtacnnccgtattgnncttctagcnntttttttttttttttttttttttttttttt

SEQ ID NO: 3633 - DNA, 84 bp, Artificial
  Barcode component
  misc_feature (33)..(34): n is a, c, g, or t
  misc_feature (43)..(44): n is a, c, g, or t
  misc_feature (53)..(54): n is a, c, g, or t
tttttttaagcagtggtatcaacgcagagtacnnccgtattgnngagtaacgnntttttttttttttttttttttttttttttt

SEQ ID NO: 3634 - DNA, 84 bp, Artificial
  Barcode component
  misc_feature (33)..(34): n is a, c, g, or t
  misc_feature (43)..(44): n is a, c, g, or t
  misc_feature (53)..(54): n is a, c, g, or t
tttttttaagcagtggtatcaacgcagagtacnnccgtattgnnctaagaggnntttttttttttttttttttttttttttttt

SEQ ID NO: 3635 - DNA, 84 bp, Artificial
  Barcode component
  misc_feature (33)..(34): n is a, c, g, or t
  misc_feature (43)..(44): n is a, c, g, or t
  misc_feature (53)..(54): n is a, c, g, or t
tttttttaagcagtggtatcaacgcagagtacnnccgtattgnnacgtgtagnntttttttttttttttttttttttttttttt

SEQ ID NO: 3636 - DNA, 84 bp, Artificial
  Barcode component
  misc_feature (33)..(34): n is a, c, g, or t
  misc_feature (43)..(44): n is a, c, g, or t
  misc_feature (53)..(54): n is a, c, g, or t
tttttttaagcagtggtatcaacgcagagtacnnccgtattgnnactacaggnntttttttttttttttttttttttttttttt

SEQ ID NO: 3637 - DNA, 84 bp, Artificial
  Barcode component
  misc_feature (33)..(34): n is a, c, g, or t
  misc_feature (43)..(44): n is a, c, g, or t
  misc_feature (53)..(54): n is a, c, g, or t
tttttttaagcagtggtatcaacgcagagtacnnccgtattgnntacaggtcnntttttttttttttttttttttttttttttt

SEQ ID NO: 3638 - DNA, 84 bp, Artificial
  Barcode component
  misc_feature (33)..(34): n is a, c, g, or t
  misc_feature (43)..(44): n is a, c, g, or t
  misc_feature (53)..(54): n is a, c, g, or t
tttttttaagcagtggtatcaacgcagagtacnnccgtattgnnctcacatgnntttttttttttttttttttttttttttttt

SEQ ID NO: 3639 - DNA, 84 bp, Artificial
  Barcode component
  misc_feature (33)..(34): n is a, c, g, or t
  misc_feature (43)..(44): n is a, c, g, or t
  misc_feature (53)..(54): n is a, c, g, or t
tttttttaagcagtggtatcaacgcagagtacnnccgtattgnnactaggagnntttttttttttttttttttttttttttttt

SEQ ID NO: 3640 - DNA, 84 bp, Artificial
  Barcode component
  misc_feature (33)..(34): n is a, c, g, or t
  misc_feature (43)..(44): n is a, c, g, or t
  misc_feature (53)..(54): n is a, c, g, or t
tttttttaagcagtggtatcaacgcagagtacnnccgtattgnnccatagganntttttttttttttttttttttttttttttt

SEQ ID NO: 3641 - DNA, 84 bp, Artificial
  Barcode component
  misc_feature (33)..(34): n is a, c, g, or t
  misc_feature (43)..(44): n is a, c, g, or t
  misc_feature (53)..(54): n is a, c, g, or t
tttttttaagcagtggtatcaacgcagagtacnnccgtattgnnggagaatcnntttttttttttttttttttttttttttttt

SEQ ID NO: 3642 - DNA, 84 bp, Artificial
  Barcode component
  misc_feature (33)..(34): n is a, c, g, or t
  misc_feature (43)..(44): n is a, c, g, or t
  misc_feature (53)..(54): n is a, c, g, or t
tttttttaagcagtggtatcaacgcagagtacnnccgtattgnngccaagaanntttttttttttttttttttttttttttttt

SEQ ID NO: 3643 - DNA, 84 bp, Artificial
  Barcode component
  misc_feature (33)..(34): n is a, c, g, or t
  misc_feature (43)..(44): n is a, c, g, or t
  misc_feature (53)..(54): n is a, c, g, or t
tttttttaagcagtggtatcaacgcagagtacnnccgtattgnnaaggcaagnntttttttttttttttttttttttttttttt

SEQ ID NO: 3644 - DNA, 84 bp, Artificial
  Barcode component
  misc_feature (33)..(34): n is a, c, g, or t
  misc_feature (43)..(44): n is a, c, g, or t
  misc_feature (53)..(54): n is a, c, g, or t
tttttttaagcagtggtatcaacgcagagtacnnccgtattgnnaatgtcgcnntttttttttttttttttttttttttttttt

SEQ ID NO: 3645 - DNA, 84 bp, Artificial
  Barcode component
  misc_feature (33)..(34): n is a, c, g, or t
  misc_feature (43)..(44): n is a, c, g, or t
  misc_feature (53)..(54): n is a, c, g, or t
tttttttaagcagtggtatcaacgcagagtacnnccgtattgnnatggaaccnntttttttttttttttttttttttttttttt

SEQ ID NO: 3646 - DNA, 84 bp, Artificial
  Barcode component
  misc_feature (33)..(34): n is a, c, g, or t
  misc_feature (43)..(44): n is a, c, g, or t
  misc_feature (53)..(54): n is a, c, g, or t
tttttttaagcagtggtatcaacgcagagtacnnccgtattgnnagaggcatnntttttttttttttttttttttttttttttt

SEQ ID NO: 3647 - DNA, 84 bp, Artificial
  Barcode component
  misc_feature (33)..(34): n is a, c, g, or t
  misc_feature (43)..(44): n is a, c, g, or t
  misc_feature (53)..(54): n is a, c, g, or t
tttttttaagcagtggtatcaacgcagagtacnnccgtattgnntgcatagcnntttttttttttttttttttttttttttttt

SEQ ID NO: 3648 - DNA, 84 bp, Artificial
  Barcode component
  misc_feature (33)..(34): n is a, c, g, or t
  misc_feature (43)..(44): n is a, c, g, or t
  misc_feature (53)..(54): n is a, c, g, or t
tttttttaagcagtggtatcaacgcagagtacnnccgtattgnnctaacgganntttttttttttttttttttttttttttttt

SEQ ID NO: 3649 - DNA, 84 bp, Artificial
  Barcode component
  misc_feature (33)..(34): n is a, c, g, or t
  misc_feature (43)..(44): n is a, c, g, or t
  misc_feature (53)..(54): n is a, c, g, or t
tttttttaagcagtggtatcaacgcagagtacnnccgtattgnntatcgaggnntttttttttttttttttttttttttttttt

SEQ ID NO: 3650 - DNA, 84 bp, Artificial
  Barcode component
  misc_feature (33)..(34): n is a, c, g, or t
  misc_feature (43)..(44): n is a, c, g, or t
  misc_feature (53)..(54): n is a, c, g, or t
tttttttaagcagtggtatcaacgcagagtacnnccgtattgnncatagcctnntttttttttttttttttttttttttttttt

SEQ ID NO: 3651 - DNA, 84 bp, Artificial
  Barcode component
  misc_feature (33)..(34): n is a, c, g, or t
  misc_feature (43)..(44): n is a, c, g, or t
  misc_feature (53)..(54): n is a, c, g, or t
tttttttaagcagtggtatcaacgcagagtacnnccgtattgnnatcgagacnntttttttttttttttttttttttttttttt

SEQ ID NO: 3652 - DNA, 84 bp, Artificial
  Barcode component
  misc_feature (33)..(34): n is a, c, g, or t
  misc_feature (43)..(44): n is a, c, g, or t
  misc_feature (53)..(54): n is a, c, g, or t
tttttttaagcagtggtatcaacgcagagtacnnccgtattgnnggaagagtnntttttttttttttttttttttttttttttt

SEQ ID NO: 3653 - DNA, 84 bp, Artificial
  Barcode component
  misc_feature (33)..(34): n is a, c, g, or t
  misc_feature (43)..(44): n is a, c, g, or t
  misc_feature (53)..(54): n is a, c, g, or t
tttttttaagcagtggtatcaacgcagagtacnnccgtattgnnccaagtagnntttttttttttttttttttttttttttttt

SEQ ID NO: 3654 - DNA, 84 bp, Artificial
  Barcode component
  misc_feature (33)..(34): n is a, c, g, or t
  misc_feature (43)..(44): n is a, c, g, or t
  misc_feature (53)..(54): n is a, c, g, or t
tttttttaagcagtggtatcaacgcagagtacnnccgtattgnnctgaacagnntttttttttttttttttttttttttttttt

SEQ ID NO: 3655 - DNA, 84 bp, Artificial
  Barcode component
  misc_feature (33)..(34): n is a, c, g, or t
  misc_feature (43)..(44): n is a, c, g, or t
  misc_feature (53)..(54): n is a, c, g, or t
tttttttaagcagtggtatcaacgcagagtacnnccgtattgnngtaggttcnntttttttttttttttttttttttttttttt

SEQ ID NO: 3656 - DNA, 84 bp, Artificial
  Barcode component
  misc_feature (33)..(34): n is a, c, g, or t
  misc_feature (43)..(44): n is a, c, g, or t
  misc_feature (53)..(54): n is a, c, g, or t
tttttttaagcagtggtatcaacgcagagtacnnccgtattgnngtatggacnntttttttttttttttttttttttttttttt

SEQ ID NO: 3657 - DNA, 84 bp, Artificial
  Barcode component
  misc_feature (33)..(34): n is a, c, g, or t
  misc_feature (43)..(44): n is a, c, g, or t
  misc_feature (53)..(54): n is a, c, g, or t
tttttttaagcagtggtatcaacgcagagtacnnccgtattgnntcgcaacanntttttttttttttttttttttttttttttt

SEQ ID NO: 3658 - DNA, 84 bp, Artificial
  Barcode component
  misc_feature (33)..(34): n is a, c, g, or t
  misc_feature (43)..(44): n is a, c, g, or t
  misc_feature (53)..(54): n is a, c, g, or t
tttttttaagcagtggtatcaacgcagagtacnnccgtattgnnccgctaatnntttttttttttttttttttttttttttttt

SEQ ID NO: 3659 - DNA, 84 bp, Artificial
  Barcode component
  misc_feature (33)..(34): n is a, c, g, or t
  misc_feature (43)..(44): n is a, c, g, or t
  misc_feature (53)..(54): n is a, c, g, or t
tttttttaagcagtggtatcaacgcagagtacnnccgtattgnngattcgcanntttttttttttttttttttttttttttttt

SEQ ID NO: 3660 - DNA, 84 bp, Artificial
  Barcode component
  misc_feature (33)..(34): n is a, c, g, or t
  misc_feature (43)..(44): n is a, c, g, or t
  misc_feature (53)..(54): n is a, c, g, or t
tttttttaagcagtggtatcaacgcagagtacnnccgtattgnncgatggaanntttttttttttttttttttttttttttttt

SEQ ID NO: 3661 - DNA, 84 bp, Artificial
  Barcode component
  misc_feature (33)..(34): n is a, c, g, or t
  misc_feature (43)..(44): n is a, c, g, or t
  misc_feature (53)..(54): n is a, c, g, or t
tttttttaagcagtggtatcaacgcagagtacnnccgtattgnnagcaagganntttttttttttttttttttttttttttttt

SEQ ID NO: 3662 - DNA, 84 bp, Artificial
  Barcode component
  misc_feature (33)..(34): n is a, c, g, or t
  misc_feature (43)..(44): n is a, c, g, or t
  misc_feature (53)..(54): n is a, c, g, or t
tttttttaagcagtggtatcaacgcagagtacnnccgtattgnncgtagcaanntttttttttttttttttttttttttttttt

SEQ ID NO: 3663 - DNA, 84 bp, Artificial
  Barcode component
  misc_feature (33)..(34): n is a, c, g, or t
  misc_feature (43)..(44): n is a, c, g, or t
  misc_feature (53)..(54): n is a, c, g, or t
tttttttaagcagtggtatcaacgcagagtacnnccgtattgnntggcagtanntttttttttttttttttttttttttttttt

SEQ ID NO: 3664 - DNA, 84 bp, Artificial
  Barcode component
  misc_feature (33)..(34): n is a, c, g, or t
  misc_feature (43)..(44): n is a, c, g, or t
  misc_feature (53)..(54): n is a, c, g, or t
tttttttaagcagtggtatcaacgcagagtacnnccgtattgnncggtagttnntttttttttttttttttttttttttttttt

SEQ ID NO: 3665 - DNA, 84 bp, Artificial
  Barcode component
  misc_feature (33)..(34): n is a, c, g, or t
  misc_feature (43)..(44): n is a, c, g, or t
  misc_feature (53)..(54): n is a, c, g, or t
tttttttaagcagtggtatcaacgcagagtacnnccgtattgnntgacttcgnntttttttttttttttttttttttttttttt

SEQ ID NO: 3666 - DNA, 84 bp, Artificial
  Barcode component
  misc_feature (33)..(34): n is a, c, g, or t
  misc_feature (43)..(44): n is a, c, g, or t
  misc_feature (53)..(54): n is a, c, g, or t
tttttttaagcagtggtatcaacgcagagtacnnccgtattgnngagtgcaanntttttttttttttttttttttttttttttt

SEQ ID NO: 3667 - DNA, 84 bp, Artificial
  Barcode component
  misc_feature (33)..(34): n is a, c, g, or t
  misc_feature (43)..(44): n is a, c, g, or t
  misc_feature (53)..(54): n is a, c, g, or t
tttttttaagcagtggtatcaacgcagagtacnnccgtattgnnacggtaacnntttttttttttttttttttttttttttttt

SEQ ID NO: 3668 - DNA, 84 bp, Artificial
  Barcode component
  misc_feature (33)..(34): n is a, c, g, or t
  misc_feature (43)..(44): n is a, c, g, or t
  misc_feature (53)..(54): n is a, c, g, or t
tttttttaagcagtggtatcaacgcagagtacnnccgtattgnnaagtggtgnntttttttttttttttttttttttttttttt

SEQ ID NO: 3669 - DNA, 84 bp, Artificial
  Barcode component
  misc_feature (33)..(34): n is a, c, g, or t
  misc_feature (43)..(44): n is a, c, g, or t
  misc_feature (53)..(54): n is a, c, g, or t
tttttttaagcagtggtatcaacgcagagtacnnccgtattgnnggagacaanntttttttttttttttttttttttttttttt

SEQ ID NO: 3670 - DNA, 84 bp, Artificial
  Barcode component
  misc_feature (33)..(34): n is a, c, g, or t
  misc_feature (43)..(44): n is a, c, g, or t
  misc_feature (53)..(54): n is a, c, g, or t
tttttttaagcagtggtatcaacgcagagtacnnccgtattgnntcaaggacnntttttttttttttttttttttttttttttt

SEQ ID NO: 3671 - DNA, 84 bp, Artificial
  Barcode component
  misc_feature (33)..(34): n is a, c, g, or t
  misc_feature (43)..(44): n is a, c, g, or t
  misc_feature (53)..(54): n is a, c, g, or t
tttttttaagcagtggtatcaacgcagagtacnnccgtattgnnaagagagcnntttttttttttttttttttttttttttttt

SEQ ID NO: 3672 - DNA, 84 bp, Artificial
  Barcode component
  misc_feature (33)..(34): n is a, c, g, or t
  misc_feature (43)..(44): n is a, c, g, or t
  misc_feature (53)..(54): n is a, c, g, or t
tttttttaagcagtggtatcaacgcagagtacnnccgtattgnncgagagatnntttttttttttttttttttttttttttttt

SEQ ID NO: 3673 - DNA, 84 bp, Artificial
  Barcode component
  misc_feature (33)..(34): n is a, c, g, or t
  misc_feature (43)..(44): n is a, c, g, or t
  misc_feature (53)..(54): n is a, c, g, or t
tttttttaagcagtggtatcaacgcagagtacnnccgtattgnnacagatggnntttttttttttttttttttttttttttttt

SEQ ID NO: 3674 - DNA, 84 bp, Artificial
  Barcode component
  misc_feature (33)..(34): n is a, c, g, or t
  misc_feature (43)..(44): n is a, c, g, or t
  misc_feature (53)..(54): n is a, c, g, or t
tttttttaagcagtggtatcaacgcagagtacnnccgtattgnnaggagtcanntttttttttttttttttttttttttttttt

SEQ ID NO: 3675 - DNA, 84 bp, Artificial
  Barcode component
  misc_feature (33)..(34): n is a, c, g, or t
  misc_feature (43)..(44): n is a, c, g, or t
  misc_feature (53)..(54): n is a, c, g, or t
tttttttaagcagtggtatcaacgcagagtacnnccgtattgnncgtgttacnntttttttttttttttttttttttttttttt

SEQ ID NO: 3676 - DNA, 84 bp, Artificial
  Barcode component
  misc_feature (33)..(34): n is a, c, g, or t
  misc_feature (43)..(44): n is a, c, g, or t
  misc_feature (53)..(54): n is a, c, g, or t
tttttttaagcagtggtatcaacgcagagtacnnccgtattgnntagtgtgcnntttttttttttttttttttttttttttttt

SEQ ID NO: 3677 - DNA, 84 bp, Artificial
  Barcode component
  misc_feature (33)..(34): n is a, c, g, or t
  misc_feature (43)..(44): n is a, c, g, or t
  misc_feature (53)..(54): n is a, c, g, or t
tttttttaagcagtggtatcaacgcagagtacnnccgtattgnnctcatgacnntttttttttttttttttttttttttttttt

SEQ ID NO: 3678 - DNA, 84 bp, Artificial
  Barcode component
  misc_feature (33)..(34): n is a, c, g, or t
  misc_feature (43)..(44): n is a, c, g, or t
  misc_feature (53)..(54): n is a, c, g, or t
tttttttaagcagtggtatcaacgcagagtacnnccgtattgnngtatccagnntttttttttttttttttttttttttttttt

SEQ ID NO: 3679 - DNA, 84 bp, Artificial
  Barcode component
  misc_feature (33)..(34): n is a, c, g, or t
  misc_feature (43)..(44): n is a, c, g, or t
  misc_feature (53)..(54): n is a, c, g, or t
tttttttaagcagtggtatcaacgcagagtacnnccgtattgnnacgcctatnntttttttttttttttttttttttttttttt

SEQ ID NO: 3680 - DNA, 84 bp, Artificial
  Barcode component
  misc_feature (33)..(34): n is a, c, g, or t
  misc_feature (43)..(44): n is a, c, g, or t
  misc_feature (53)..(54): n is a, c, g, or t
tttttttaagcagtggtatcaacgcagagtacnnccgtattgnnaacgacctnntttttttttttttttttttttttttttttt

SEQ ID NO: 3681 - DNA, 84 bp, Artificial
  Barcode component
  misc_feature (33)..(34): n is a, c, g, or t
  misc_feature (43)..(44): n is a, c, g, or t
  misc_feature (53)..(54): n is a, c, g, or t
tttttttaagcagtggtatcaacgcagagtacnnccgtattgnnatcaggctnntttttttttttttttttttttttttttttt

SEQ ID NO: 3682 - DNA, 84 bp, Artificial
  Barcode component
  misc_feature (33)..(34): n is a, c, g, or t
  misc_feature (43)..(44): n is a, c, g, or t
  misc_feature (53)..(54): n is a, c, g, or t
tttttttaagcagtggtatcaacgcagagtacnnccgtattgnncaagttcgnntttttttttttttttttttttttttttttt

SEQ ID NO: 3683 - DNA, 84 bp, Artificial
  Barcode component
  misc_feature (33)..(34): n is a, c, g, or t
  misc_feature (43)..(44): n is a, c, g, or t
  misc_feature (53)..(54): n is a, c, g, or t
tttttttaagcagtggtatcaacgcagagtacnnccgtattgnntagccaganntttttttttttttttttttttttttttttt

SEQ ID NO: 3684 - DNA, 84 bp, Artificial
  Barcode component
  misc_feature (33)..(34): n is a, c, g, or t
  misc_feature (43)..(44): n is a, c, g, or t
  misc_feature (53)..(54): n is a, c, g, or t
tttttttaagcagtggtatcaacgcagagtacnnccgtattgnncaatcacgnntttttttttttttttttttttttttttttt

SEQ ID NO: 3685 - DNA, 84 bp, Artificial
  Barcode component
  misc_feature (33)..(34): n is a, c, g, or t
  misc_feature (43)..(44): n is a, c, g, or t
  misc_feature (53)..(54): n is a, c, g, or t
tttttttaagcagtggtatcaacgcagagtacnnccgtattgnngcaacaagnntttttttttttttttttttttttttttttt

SEQ ID NO: 3686 - DNA, 84 bp, Artificial
  Barcode component
  misc_feature (33)..(34): n is a, c, g, or t
  misc_feature (43)..(44): n is a, c, g, or t
  misc_feature (53)..(54): n is a, c, g, or t
tttttttaagcagtggtatcaacgcagagtacnnccgtattgnncacgacaanntttttttttttttttttttttttttttttt

SEQ ID NO: 3687 - DNA, 84 bp, Artificial
  Barcode component
  misc_feature (33)..(34): n is a, c, g, or t
  misc_feature (43)..(44): n is a, c, g, or t
  misc_feature (53)..(54): n is a, c, g, or t
tttttttaagcagtggtatcaacgcagagtacnnccgtattgnntacggaganntttttttttttttttttttttttttttttt

SEQ ID NO: 3688 - DNA, 84 bp, Artificial
  Barcode component
  misc_feature (33)..(34): n is a, c, g, or t
  misc_feature (43)..(44): n is a, c, g, or t
  misc_feature (53)..(54): n is a, c, g, or t
tttttttaagcagtggtatcaacgcagagtacnnccgtattgnncgacaaganntttttttttttttttttttttttttttttt

SEQ ID NO: 3689 - DNA, 84 bp, Artificial
  Barcode component
  misc_feature (33)..(34): n is a, c, g, or t
  misc_feature (43)..(44): n is a, c, g, or t
  misc_feature (53)..(54): n is a, c, g, or t
tttttttaagcagtggtatcaacgcagagtacnnccgtattgnncgaagtganntttttttttttttttttttttttttttttt

SEQ ID NO: 3690 - DNA, 84 bp, Artificial
  Barcode component
  misc_feature (33)..(34): n is a, c, g, or t
  misc_feature (43)..(44): n is a, c, g, or t
  misc_feature (53)..(54): n is a, c, g, or t
tttttttaagcagtggtatcaacgcagagtacnnccgtattgnnagctggtanntttttttttttttttttttttttttttttt

SEQ ID NO: 3691 - DNA, 84 bp, Artificial
  Barcode component
  misc_feature (33)..(34): n is a, c, g, or t
  misc_feature (43)..(44): n is a, c, g, or t
  misc_feature (53)..(54): n is a, c, g, or t
tttttttaagcagtggtatcaacgcagagtacnnccgtattgnnaactaggcnntttttttttttttttttttttttttttttt

SEQ ID NO: 3692 - DNA, 84 bp, Artificial
  Barcode component
  misc_feature (33)..(34): n is a, c, g, or t
  misc_feature (43)..(44): n is a, c, g, or t
  misc_feature (53)..(54): n is a, c, g, or t
tttttttaagcagtggtatcaacgcagagtacnnccgtattgnncagcaagtnntttttttttttttttttttttttttttttt

SEQ ID NO: 3693 - DNA, 84 bp, Artificial
  Barcode component
  misc_feature (33)..(34): n is a, c, g, or t
  misc_feature (43)..(44): n is a, c, g, or t
  misc_feature (53)..(54): n is a, c, g, or t
tttttttaagcagtggtatcaacgcagagtacnnccgtattgnnacgaggtanntttttttttttttttttttttttttttttt

SEQ ID NO: 3694 - DNA, 84 bp, Artificial
  Barcode component
  misc_feature (33)..(34): n is a, c, g, or t
  misc_feature (43)..(44): n is a, c, g, or t
  misc_feature (53)..(54): n is a, c, g, or t
tttttttaagcagtggtatcaacgcagagtacnnccgtattgnncatcttccnntttttttttttttttttttttttttttttt

SEQ ID NO: 3695 - DNA, 84 bp, Artificial
  Barcode component
  misc_feature (33)..(34): n is a, c, g, or t
  misc_feature (43)..(44): n is a, c, g, or t
  misc_feature (53)..(54): n is a, c, g, or t
tttttttaagcagtggtatcaacgcagagtacnnccgtattgnncctgaatcnntttttttttttttttttttttttttttttt

SEQ ID NO: 3696 - DNA, 84 bp, Artificial
  Barcode component
  misc_feature (33)..(34): n is a, c, g, or t
  misc_feature (43)..(44): n is a, c, g, or t
  misc_feature (53)..(54): n is a, c, g, or t
tttttttaagcagtggtatcaacgcagagtacnnccgtattgnntgcagactnntttttttttttttttttttttttttttttt

SEQ ID NO: 3697 - DNA, 84 bp, Artificial
  Barcode component
  misc_feature (33)..(34): n is a, c, g, or t
  misc_feature (43)..(44): n is a, c, g, or t
  misc_feature (53)..(54): n is a, c, g, or t
tttttttaagcagtggtatcaacgcagagtacnnccgtattgnnagatgtggnntttttttttttttttttttttttttttttt

SEQ ID NO: 3698 - DNA, 84 bp, Artificial
  Barcode component
  misc_feature (33)..(34): n is a, c, g, or t
  misc_feature (43)..(44): n is a, c, g, or t
  misc_feature (53)..(54): n is a, c, g, or t
tttttttaagcagtggtatcaacgcagagtacnnccgtattgnnagttcgacnntttttttttttttttttttttttttttttt

SEQ ID NO: 3699 - DNA, 84 bp, Artificial
  Barcode component
  misc_feature (33)..(34): n is a, c, g, or t
  misc_feature (43)..(44): n is a, c, g, or t
  misc_feature (53)..(54): n is a, c, g, or t
tttttttaagcagtggtatcaacgcagagtacnnccgtattgnnacaacctcnntttttttttttttttttttttttttttttt

SEQ ID NO: 3700 - DNA, 84 bp, Artificial
  Barcode component
  misc_feature (33)..(34): n is a, c, g, or t
  misc_feature (43)..(44): n is a, c, g, or t
  misc_feature (53)..(54): n is a, c, g, or t
tttttttaagcagtggtatcaacgcagagtacnnccgtattgnncatggtagnntttttttttttttttttttttttttttttt

SEQ ID NO: 3701 - DNA, 84 bp, Artificial
  Barcode component
  misc_feature (33)..(34): n is a, c, g, or t
  misc_feature (43)..(44): n is a, c, g, or t
  misc_feature (53)..(54): n is a, c, g, or t
tttttttaagcagtggtatcaacgcagagtacnnccgtattgnncgtatctcnntttttttttttttttttttttttttttttt

SEQ ID NO: 3702 - DNA, 84 bp, Artificial
  Barcode component
  misc_feature (33)..(34): n is a, c, g, or t
  misc_feature (43)..(44): n is a, c, g, or t
  misc_feature (53)..(54): n is a, c, g, or t
tttttttaagcagtggtatcaacgcagagtacnnccgtattgnncctagttcnntttttttttttttttttttttttttttttt

SEQ ID NO: 3703 - DNA, 84 bp, Artificial
  Barcode component
  misc_feature (33)..(34): n is a, c, g, or t
  misc_feature (43)..(44): n is a, c, g, or t
  misc_feature (53)..(54): n is a, c, g, or t
tttttttaagcagtggtatcaacgcagagtacnnccgtattgnncaagagtcnntttttttttttttttttttttttttttttt

SEQ ID NO: 3704 - DNA, 84 bp, Artificial
  Barcode component
  misc_feature (33)..(34): n is a, c, g, or t
  misc_feature (43)..(44): n is a, c, g, or t
  misc_feature (53)..(54): n is a, c, g, or t
tttttttaagcagtggtatcaacgcagagtacnnaaggaggtnnaatcggcanntttttttttttttttttttttttttttttt

SEQ ID NO: 3705 - DNA, 84 bp, Artificial
  Barcode component
  misc_feature (33)..(34): n is a, c, g, or t
  misc_feature (43)..(44): n is a, c, g, or t
  misc_feature (53)..(54): n is a, c, g, or t
tttttttaagcagtggtatcaacgcagagtacnnaaggaggtnntacggcatnntttttttttttttttttttttttttttttt

SEQ ID NO: 3706 - DNA, 84 bp, Artificial
  Barcode component
  misc_feature (33)..(34): n is a, c, g, or t
  misc_feature (43)..(44): n is a, c, g, or t
  misc_feature (53)..(54): n is a, c, g, or t
tttttttaagcagtggtatcaacgcagagtacnnaaggaggtnnttggatcgnntttttttttttttttttttttttttttttt

SEQ ID NO: 3707 - DNA, 84 bp, Artificial
  Barcode component
  misc_feature (33)..(34): n is a, c, g, or t
  misc_feature (43)..(44): n is a, c, g, or t
  misc_feature (53)..(54): n is a, c, g, or t
tttttttaagcagtggtatcaacgcagagtacnnaaggaggtnntggaacganntttttttttttttttttttttttttttttt

SEQ ID NO: 3708 - DNA, 84 bp, Artificial
  Barcode component
  misc_feature (33)..(34): n is a, c, g, or t
  misc_feature (43)..(44): n is a, c, g, or t
  misc_feature (53)..(54): n is a, c, g, or t
tttttttaagcagtggtatcaacgcagagtacnnaaggaggtnnggcaatcanntttttttttttttttttttttttttttttt

SEQ ID NO: 3709 - DNA, 84 bp, Artificial
  Barcode component
  misc_feature (33)..(34): n is a, c, g, or t
  misc_feature (43)..(44): n is a, c, g, or t
  misc_feature (53)..(54): n is a, c, g, or t
tttttttaagcagtggtatcaacgcagagtacnnaaggaggtnngaatccganntttttttttttttttttttttttttttttt

SEQ ID NO: 3710 - DNA, 84 bp, Artificial
  Barcode component
  misc_feature (33)..(34): n is a, c, g, or t
  misc_feature (43)..(44): n is a, c, g, or t
  misc_feature (53)..(54): n is a, c, g, or t
tttttttaagcagtggtatcaacgcagagtacnnaaggaggtnnttacggtgnntttttttttttttttttttttttttttttt

SEQ ID NO: 3711 - DNA, 84 bp, Artificial
  Barcode component
  misc_feature (33)..(34): n is a, c, g, or t
  misc_feature (43)..(44): n is a, c, g, or t
  misc_feature (53)..(54): n is a, c, g, or t
tttttttaagcagtggtatcaacgcagagtacnnaaggaggtnncatatcggnntttttttttttttttttttttttttttttt

SEQ ID NO: 3712 - DNA, 84 bp, Artificial
  Barcode component
  misc_feature (33)..(34): n is a, c, g, or t
  misc_feature (43)..(44): n is a, c, g, or t
  misc_feature (53)..(54): n is a, c, g, or t
tttttttaagcagtggtatcaacgcagagtacnnaaggaggtnncttcggtanntttttttttttttttttttttttttttttt

SEQ ID NO: 3713 - DNA, 84 bp, Artificial
  Barcode component
  misc_feature (33)..(34): n is a, c, g, or t
  misc_feature (43)..(44): n is a, c, g, or t
  misc_feature (53)..(54): n is a, c, g, or t
tttttttaagcagtggtatcaacgcagagtacnnaaggaggtnntcctaacgnntttttttttttttttttttttttttttttt

SEQ ID NO: 3714 - DNA, 84 bp, Artificial
  Barcode component
  misc_feature (33)..(34): n is a, c, g, or t
  misc_feature (43)..(44): n is a, c, g, or t
  misc_feature (53)..(54): n is a, c, g, or t
tttttttaagcagtggtatcaacgcagagtacnnaaggaggtnngtaagccanntttttttttttttttttttttttttttttt

SEQ ID NO: 3715 - DNA, 84 bp, Artificial
  Barcode component
  misc_feature (33)..(34): n is a, c, g, or t
  misc_feature (43)..(44): n is a, c, g, or t
  misc_feature (53)..(54): n is a, c, g, or t
tttttttaagcagtggtatcaacgcagagtacnnaaggaggtnntaaggtggnntttttttttttttttttttttttttttttt

SEQ ID NO: 3716 - DNA, 84 bp, Artificial
  Barcode component
  misc_feature (33)..(34): n is a, c, g, or t
  misc_feature (43)..(44): n is a, c, g, or t
  misc_feature (53)..(54): n is a, c, g, or t
tttttttaagcagtggtatcaacgcagagtacnnaaggaggtnnggtaagctnntttttttttttttttttttttttttttttt

SEQ ID NO: 3717 - DNA, 84 bp, Artificial
  Barcode component
  misc_feature (33)..(34): n is a, c, g, or t
  misc_feature (43)..(44): n is a, c, g, or t
  misc_feature (53)..(54): n is a, c, g, or t
tttttttaagcagtggtatcaacgcagagtacnnaaggaggtnntgtgtcganntttttttttttttttttttttttttttttt

SEQ ID NO: 3718 - DNA, 84 bp, Artificial
  Barcode component
  misc_feature (33)..(34): n is a, c, g, or t
  misc_feature (43)..(44): n is a, c, g, or t
  misc_feature (53)..(54): n is a, c, g, or t
tttttttaagcagtggtatcaacgcagagtacnnaaggaggtnngagcatganntttttttttttttttttttttttttttttt

SEQ ID NO: 3719 - DNA, 84 bp, Artificial
  Barcode component
  misc_feature (33)..(34): n is a, c, g, or t
  misc_feature (43)..(44): n is a, c, g, or t
  misc_feature (53)..(54): n is a, c, g, or t
tttttttaagcagtggtatcaacgcagagtacnnaaggaggtnntcgaagtcnntttttttttttttttttttttttttttttt

SEQ ID NO: 3720 - DNA, 84 bp, Artificial
  Barcode component
  misc_feature (33)..(34): n is a, c, g, or t
  misc_feature (43)..(44): n is a, c, g, or t
  misc_feature (53)..(54): n is a, c, g, or t
tttttttaagcagtggtatcaacgcagagtacnnaaggaggtnnggtgaacanntttttttttttttttttttttttttttttt

SEQ ID NO: 3721 - DNA, 84 bp, Artificial
  Barcode component
  misc_feature (33)..(34): n is a, c, g, or t
  misc_feature (43)..(44): n is a, c, g, or t
  misc_feature (53)..(54): n is a, c, g, or t
tttttttaagcagtggtatcaacgcagagtacnnaaggaggtnnacatgcacnntttttttttttttttttttttttttttttt

SEQ ID NO: 3722 - DNA, 84 bp, Artificial
  Barcode component
  misc_feature (33)..(34): n is a, c, g, or t
  misc_feature (43)..(44): n is a, c, g, or t
  misc_feature (53)..(54): n is a, c, g, or t
tttttttaagcagtggtatcaacgcagagtacnnaaggaggtnnccaacagtnntttttttttttttttttttttttttttttt

SEQ ID NO: 3723 - DNA, 84 bp, Artificial
  Barcode component
  misc_feature (33)..(34): n is a, c, g, or t
  misc_feature (43)..(44): n is a, c, g, or t
  misc_feature (53)..(54): n is a, c, g, or t
tttttttaagcagtggtatcaacgcagagtacnnaaggaggtnnagaacagcnntttttttttttttttttttttttttttttt

SEQ ID NO: 3724 - DNA, 84 bp, Artificial
  Barcode component
  misc_feature (33)..(34): n is a, c, g, or t
  misc_feature (43)..(44): n is a, c, g, or t
  misc_feature (53)..(54): n is a, c, g, or t
tttttttaagcagtggtatcaacgcagagtacnnaaggaggtnngaacacgtnntttttttttttttttttttttttttttttt

SEQ ID NO: 3725 - DNA, 84 bp, Artificial
  Barcode component
  misc_feature (33)..(34): n is a, c, g, or t
  misc_feature (43)..(44): n is a, c, g, or t
  misc_feature (53)..(54): n is a, c, g, or t
tttttttaagcagtggtatcaacgcagagtacnnaaggaggtnnggtcttcanntttttttttttttttttttttttttttttt

SEQ ID NO: 3726 - DNA, 84 bp, Artificial
  Barcode component
  misc_feature (33)..(34): n is a, c, g, or t
  misc_feature (43)..(44): n is a, c, g, or t
  misc_feature (53)..(54): n is a, c, g, or t
tttttttaagcagtggtatcaacgcagagtacnnaaggaggtnnaggttcagnntttttttttttttttttttttttttttttt

SEQ ID NO: 3727 - DNA, 84 bp, Artificial
  Barcode component
  misc_feature (33)..(34): n is a, c, g, or t
  misc_feature (43)..(44): n is a, c, g, or t
  misc_feature (53)..(54): n is a, c, g, or t
tttttttaagcagtggtatcaacgcagagtacnnaaggaggtnnctagagcanntttttttttttttttttttttttttttttt

SEQ ID NO: 3728 - DNA, 84 bp, Artificial
  Barcode component
  misc_feature (33)..(34): n is a, c, g, or t
  misc_feature (43)..(44): n is a, c, g, or t
  misc_feature (53)..(54): n is a, c, g, or t
tttttttaagcagtggtatcaacgcagagtacnnaaggaggtnncttctagcnntttttttttttttttttttttttttttttt

SEQ ID NO: 3729 - DNA, 84 bp, Artificial
  Barcode component
  misc_feature (33)..(34): n is a, c, g, or t
  misc_feature (43)..(44): n is a, c, g, or t
  misc_feature (53)..(54): n is a, c, g, or t
tttttttaagcagtggtatcaacgcagagtacnnaaggaggtnngagtaacgnntttttttttttttttttttttttttttttt

SEQ ID NO: 3730 - DNA, 84 bp, Artificial
  Barcode component
  misc_feature (33)..(34): n is a, c, g, or t
  misc_feature (43)..(44): n is a, c, g, or t
  misc_feature (53)..(54): n is a, c, g, or t
tttttttaagcagtggtatcaacgcagagtacnnaaggaggtnnctaagaggnntttttttttttttttttttttttttttttt

SEQ ID NO: 3731 - DNA, 84 bp, Artificial
  Barcode component
  misc_feature (33)..(34): n is a, c, g, or t
  misc_feature (43)..(44): n is a, c, g, or t
  misc_feature (53)..(54): n is a, c, g, or t
tttttttaagcagtggtatcaacgcagagtacnnaaggaggtnnacgtgtagnntttttttttttttttttttttttttttttt

SEQ ID NO: 3732 - DNA, 84 bp, Artificial
  Barcode component
  misc_feature (33)..(34): n is a, c, g, or t
  misc_feature (43)..(44): n is a, c, g, or t
  misc_feature (53)..(54): n is a, c, g, or t
tttttttaagcagtggtatcaacgcagagtacnnaaggaggtnnactacaggnntttttttttttttttttttttttttttttt

SEQ ID NO: 3733 - DNA, 84 bp, Artificial
  Barcode component
  misc_feature (33)..(34): n is a, c, g, or t
  misc_feature (43)..(44): n is a, c, g, or t
  misc_feature (53)..(54): n is a, c, g, or t
tttttttaagcagtggtatcaacgcagagtacnnaaggaggtnntacaggtcnntttttttttttttttttttttttttttttt

SEQ ID NO: 3734 - DNA, 84 bp, Artificial
  Barcode component
  misc_feature (33)..(34): n is a, c, g, or t
  misc_feature (43)..(44): n is a, c, g, or t
  misc_feature (53)..(54): n is a, c, g, or t
tttttttaagcagtggtatcaacgcagagtacnnaaggaggtnnctcacatgnntttttttttttttttttttttttttttttt

SEQ ID NO: 3735 - DNA, 84 bp, Artificial
  Barcode component
  misc_feature (33)..(34): n is a, c, g, or t
  misc_feature (43)..(44): n is a, c, g, or t
  misc_feature (53)..(54): n is a, c, g, or t
tttttttaagcagtggtatcaacgcagagtacnnaaggaggtnnactaggagnntttttttttttttttttttttttttttttt

SEQ ID NO: 3736 - DNA, 84 bp, Artificial
  Barcode component
  misc_feature (33)..(34): n is a, c, g, or t
  misc_feature (43)..(44): n is a, c, g, or t
  misc_feature (53)..(54): n is a, c, g, or t
tttttttaagcagtggtatcaacgcagagtacnnaaggaggtnnccatagganntttttttttttttttttttttttttttttt

SEQ ID NO: 3737 - DNA, 84 bp, Artificial
  Barcode component
  misc_feature (33)..(34): n is a, c, g, or t
  misc_feature (43)..(44): n is a, c, g, or t
  misc_feature (53)..(54): n is a, c, g, or t
tttttttaagcagtggtatcaacgcagagtacnnaaggaggtnnggagaatcnntttttttttttttttttttttttttttttt

SEQ ID NO: 3738 - DNA, 84 bp, Artificial
  Barcode component
  misc_feature (33)..(34): n is a, c, g, or t
  misc_feature (43)..(44): n is a, c, g, or t
  misc_feature (53)..(54): n is a, c, g, or t
tttttttaagcagtggtatcaacgcagagtacnnaaggaggtnngccaagaanntttttttttttttttttttttttttttttt

SEQ ID NO: 3739 - DNA, 84 bp, Artificial
  Barcode component
  misc_feature (33)..(34): n is a, c, g, or t
  misc_feature (43)..(44): n is a, c, g, or t
  misc_feature (53)..(54): n is a, c, g, or t
tttttttaagcagtggtatcaacgcagagtacnnaaggaggtnnaaggcaagnntttttttttttttttttttttttttttttt

SEQ ID NO: 3740 - DNA, 84 bp, Artificial
  Barcode component
  misc_feature (33)..(34): n is a, c, g, or t
  misc_feature (43)..(44): n is a, c, g, or t
  misc_feature (53)..(54): n is a, c, g, or t
tttttttaagcagtggtatcaacgcagagtacnnaaggaggtnnaatgtcgcnntttttttttttttttttttttttttttttt

SEQ ID NO: 3741 - DNA, 84 bp, Artificial
  Barcode component
  misc_feature (33)..(34): n is a, c, g, or t
  misc_feature (43)..(44): n is a, c, g, or t
  misc_feature (53)..(54): n is a, c, g, or t
tttttttaagcagtggtatcaacgcagagtacnnaaggaggtnnatggaaccnntttttttttttttttttttttttttttttt

SEQ ID NO: 3742 - DNA, 84 bp, Artificial
  Barcode component
  misc_feature (33)..(34): n is a, c, g, or t
  misc_feature (43)..(44): n is a, c, g, or t
  misc_feature (53)..(54): n is a, c, g, or t
tttttttaagcagtggtatcaacgcagagtacnnaaggaggtnnagaggcatnntttttttttttttttttttttttttttttt

SEQ ID NO: 3743 - DNA, 84 bp, Artificial
  Barcode component
  misc_feature (33)..(34): n is a, c, g, or t
  misc_feature (43)..(44): n is a, c, g, or t
  misc_feature (53)..(54): n is a, c, g, or t
tttttttaagcagtggtatcaacgcagagtacnnaaggaggtnntgcatagcnntttttttttttttttttttttttttttttt

SEQ ID NO: 3744 - DNA, 84 bp, Artificial
  Barcode component
  misc_feature (33)..(34): n is a, c, g, or t
  misc_feature (43)..(44): n is a, c, g, or t
  misc_feature (53)..(54): n is a, c, g, or t
tttttttaagcagtggtatcaacgcagagtacnnaaggaggtnnctaacgganntttttttttttttttttttttttttttttt

SEQ ID NO: 3745 - DNA, 84 bp, Artificial
  Barcode component
  misc_feature (33)..(34): n is a, c, g, or t
  misc_feature (43)..(44): n is a, c, g, or t
  misc_feature (53)..(54): n is a, c, g, or t
tttttttaagcagtggtatcaacgcagagtacnnaaggaggtnntatcgaggnntttttttttttttttttttttttttttttt

SEQ ID NO: 3746 - DNA, 84 bp, Artificial
  Barcode component
  misc_feature (33)..(34): n is a, c, g, or t
  misc_feature (43)..(44): n is a, c, g, or t
  misc_feature (53)..(54): n is a, c, g, or t
tttttttaagcagtggtatcaacgcagagtacnnaaggaggtnncatagcctnntttttttttttttttttttttttttttttt

SEQ ID NO: 3747 - DNA, 84 bp, Artificial
  Barcode component
  misc_feature (33)..(34): n is a, c, g, or t
  misc_feature (43)..(44): n is a, c, g, or t
  misc_feature (53)..(54): n is a, c, g, or t
tttttttaagcagtggtatcaacgcagagtacnnaaggaggtnnatcgagacnntttttttttttttttttttttttttttttt

SEQ ID NO: 3748 - DNA, 84 bp, Artificial
  Barcode component
  misc_feature (33)..(34): n is a, c, g, or t
  misc_feature (43)..(44): n is a, c, g, or t
  misc_feature (53)..(54): n is a, c, g, or t
tttttttaagcagtggtatcaacgcagagtacnnaaggaggtnnggaagagtnntttttttttttttttttttttttttttttt

SEQ ID NO: 3749 - DNA, 84 bp, Artificial
  Barcode component
  misc_feature (33)..(34): n is a, c, g, or t
  misc_feature (43)..(44): n is a, c, g, or t
  misc_feature (53)..(54): n is a, c, g, or t
tttttttaagcagtggtatcaacgcagagtacnnaaggaggtnnccaagtagnntttttttttttttttttttttttttttttt

SEQ ID NO: 3750 - DNA, 84 bp, Artificial
  Barcode component
  misc_feature (33)..(34): n is a, c, g, or t
  misc_feature (43)..(44): n is a, c, g, or t
  misc_feature (53)..(54): n is a, c, g, or t
tttttttaagcagtggtatcaacgcagagtacnnaaggaggtnnctgaacagnntttttttttttttttttttttttttttttt

SEQ ID NO: 3751 - DNA, 84 bp, Artificial
  Barcode component
  misc_feature (33)..(34): n is a, c, g, or t
  misc_feature (43)..(44): n is a, c, g, or t
  misc_feature (53)..(54): n is a, c, g, or t
tttttttaagcagtggtatcaacgcagagtacnnaaggaggtnngtaggttcnntttttttttttttttttttttttttttttt

SEQ ID NO: 3752 - DNA, 84 bp, Artificial
  Barcode component
  misc_feature (33)..(34): n is a, c, g, or t
  misc_feature (43)..(44): n is a, c, g, or t
  misc_feature (53)..(54): n is a, c, g, or t
tttttttaagcagtggtatcaacgcagagtacnnaaggaggtnngtatggacnntttttttttttttttttttttttttttttt

SEQ ID NO: 3753 - DNA, 84 bp, Artificial
  Barcode component
  misc_feature (33)..(34): n is a, c, g, or t
  misc_feature (43)..(44): n is a, c, g, or t
  misc_feature (53)..(54): n is a, c, g, or t
tttttttaagcagtggtatcaacgcagagtacnnaaggaggtnntcgcaacanntttttttttttttttttttttttttttttt

SEQ ID NO: 3754 - DNA, 84 bp, Artificial
  Barcode component
  misc_feature (33)..(34): n is a, c, g, or t
  misc_feature (43)..(44): n is a, c, g, or t
  misc_feature (53)..(54): n is a, c, g, or t
tttttttaagcagtggtatcaacgcagagtacnnaaggaggtnnccgctaatnntttttttttttttttttttttttttttttt

SEQ ID NO: 3755 - DNA, 84 bp, Artificial
  Barcode component
  misc_feature (33)..(34): n is a, c, g, or t
  misc_feature (43)..(44): n is a, c, g, or t
  misc_feature (53)..(54): n is a, c, g, or t
tttttttaagcagtggtatcaacgcagagtacnnaaggaggtnngattcgcanntttttttttttttttttttttttttttttt

SEQ ID NO: 3756 - DNA, 84 bp, Artificial
  Barcode component
  misc_feature (33)..(34): n is a, c, g, or t
  misc_feature (43)..(44): n is a, c, g, or t
  misc_feature (53)..(54): n is a, c, g, or t
tttttttaagcagtggtatcaacgcagagtacnnaaggaggtnncgatggaanntttttttttttttttttttttttttttttt

SEQ ID NO: 3757 - DNA, 84 bp, Artificial
  Barcode component
  misc_feature (33)..(34): n is a, c, g, or t
  misc_feature (43)..(44): n is a, c, g, or t
  misc_feature (53)..(54): n is a, c, g, or t
tttttttaagcagtggtatcaacgcagagtacnnaaggaggtnnagcaagganntttttttttttttttttttttttttttttt

SEQ ID NO: 3758 - DNA, 84 bp, Artificial
  Barcode component
  misc_feature (33)..(34): n is a, c, g, or t
  misc_feature (43)..(44): n is a, c, g, or t
  misc_feature (53)..(54): n is a, c, g, or t
tttttttaagcagtggtatcaacgcagagtacnnaaggaggtnncgtagcaanntttttttttttttttttttttttttttttt

SEQ ID NO: 3759 - DNA, 84 bp, Artificial
  Barcode component
  misc_feature (33)..(34): n is a, c, g, or t
  misc_feature (43)..(44): n is a, c, g, or t
  misc_feature (53)..(54): n is a, c, g, or t
tttttttaagcagtggtatcaacgcagagtacnnaaggaggtnntggcagtanntttttttttttttttttttttttttttttt

SEQ ID NO: 3760 - DNA, 84 bp, Artificial
  Barcode component
  misc_feature (33)..(34): n is a, c, g, or t
  misc_feature (43)..(44): n is a, c, g, or t
  misc_feature (53)..(54): n is a, c, g, or t
tttttttaagcagtggtatcaacgcagagtacnnaaggaggtnncggtagttnntttttttttttttttttttttttttttttt

SEQ ID NO: 3761 - DNA, 84 bp, Artificial
  Barcode component
  misc_feature (33)..(34): n is a, c, g, or t
  misc_feature (43)..(44): n is a, c, g, or t
  misc_feature (53)..(54): n is a, c, g, or t
tttttttaagcagtggtatcaacgcagagtacnnaaggaggtnntgacttcgnntttttttttttttttttttttttttttttt

SEQ ID NO: 3762 - DNA, 84 bp, Artificial
  Barcode component
  misc_feature (33)..(34): n is a, c, g, or t
  misc_feature (43)..(44): n is a, c, g, or t
  misc_feature (53)..(54): n is a, c, g, or t
tttttttaagcagtggtatcaacgcagagtacnnaaggaggtnngagtgcaanntttttttttttttttttttttttttttttt

SEQ ID NO: 3763 - DNA, 84 bp, Artificial
  Barcode component
  misc_feature (33)..(34): n is a, c, g, or t
  misc_feature (43)..(44): n is a, c, g, or t
  misc_feature (53)..(54): n is a, c, g, or t
tttttttaagcagtggtatcaacgcagagtacnnaaggaggtnnacggtaacnntttttttttttttttttttttttttttttt

SEQ ID NO: 3764 - DNA, 84 bp, Artificial
  Barcode component
  misc_feature (33)..(34): n is a, c, g, or t
  misc_feature (43)..(44): n is a, c, g, or t
  misc_feature (53)..(54): n is a, c, g, or t
tttttttaagcagtggtatcaacgcagagtacnnaaggaggtnnaagtggtgnntttttttttttttttttttttttttttttt

SEQ ID NO: 3765 - DNA, 84 bp, Artificial
  Barcode component
  misc_feature (33)..(34): n is a, c, g, or t
  misc_feature (43)..(44): n is a, c, g, or t
  misc_feature (53)..(54): n is a, c, g, or t
tttttttaagcagtggtatcaacgcagagtacnnaaggaggtnnggagacaanntttttttttttttttttttttttttttttt

SEQ ID NO: 3766 - DNA, 84 bp, Artificial
  Barcode component
  misc_feature (33)..(34): n is a, c, g, or t
  misc_feature (43)..(44): n is a, c, g, or t
  misc_feature (53)..(54): n is a, c, g, or t
tttttttaagcagtggtatcaacgcagagtacnnaaggaggtnntcaaggacnntttttttttttttttttttttttttttttt

SEQ ID NO: 3767 - DNA, 84 bp, Artificial
  Barcode component
  misc_feature (33)..(34): n is a, c, g, or t
  misc_feature (43)..(44): n is a, c, g, or t
  misc_feature (53)..(54): n is a, c, g, or t
tttttttaagcagtggtatcaacgcagagtacnnaaggaggtnnaagagagcnntttttttttttttttttttttttttttttt

SEQ ID NO: 3768 - DNA, 84 bp, Artificial
  Barcode component
  misc_feature (33)..(34): n is a, c, g, or t
  misc_feature (43)..(44): n is a, c, g, or t
  misc_feature (53)..(54): n is a, c, g, or t
tttttttaagcagtggtatcaacgcagagtacnnaaggaggtnncgagagatnntttttttttttttttttttttttttttttt

SEQ ID NO: 3769 - DNA, 84 bp, Artificial
  Barcode component
  misc_feature (33)..(34): n is a, c, g, or t
  misc_feature (43)..(44): n is a, c, g, or t
  misc_feature (53)..(54): n is a, c, g, or t
tttttttaagcagtggtatcaacgcagagtacnnaaggaggtnnacagatggnntttttttttttttttttttttttttttttt

SEQ ID NO: 3770 - DNA, 84 bp, Artificial
  Barcode component
  misc_feature (33)..(34): n is a, c, g, or t
  misc_feature (43)..(44): n is a, c, g, or t
  misc_feature (53)..(54): n is a, c, g, or t
tttttttaagcagtggtatcaacgcagagtacnnaaggaggtnnaggagtcanntttttttttttttttttttttttttttttt

SEQ ID NO: 3771 - DNA, 84 bp, Artificial
  Barcode component
  misc_feature (33)..(34): n is a, c, g, or t
  misc_feature (43)..(44): n is a, c, g, or t
  misc_feature (53)..(54): n is a, c, g, or t
tttttttaagcagtggtatcaacgcagagtacnnaaggaggtnncgtgttacnntttttttttttttttttttttttttttttt

SEQ ID NO: 3772 - DNA, 84 bp, Artificial
  Barcode component
  misc_feature (33)..(34): n is a, c, g, or t
  misc_feature (43)..(44): n is a, c, g, or t
  misc_feature (53)..(54): n is a, c, g, or t
tttttttaagcagtggtatcaacgcagagtacnnaaggaggtnntagtgtgcnntttttttttttttttttttttttttttttt

SEQ ID NO: 3773 - DNA, 84 bp, Artificial
  Barcode component
  misc_feature (33)..(34): n is a, c, g, or t
  misc_feature (43)..(44): n is a, c, g, or t
  misc_feature (53)..(54): n is a, c, g, or t
tttttttaagcagtggtatcaacgcagagtacnnaaggaggtnnctcatgacnntttttttttttttttttttttttttttttt

SEQ ID NO: 3774 - DNA, 84 bp, Artificial
  Barcode component
  misc_feature (33)..(34): n is a, c, g, or t
  misc_feature (43)..(44): n is a, c, g, or t
  misc_feature (53)..(54): n is a, c, g, or t
tttttttaagcagtggtatcaacgcagagtacnnaaggaggtnngtatccagnntttttttttttttttttttttttttttttt

SEQ ID NO: 3775 - DNA, 84 bp, Artificial
  Barcode component
  misc_feature (33)..(34): n is a, c, g, or t
  misc_feature (43)..(44): n is a, c, g, or t
  misc_feature (53)..(54): n is a, c, g, or t
tttttttaagcagtggtatcaacgcagagtacnnaaggaggtnnacgcctatnntttttttttttttttttttttttttttttt

SEQ ID NO: 3776 - DNA, 84 bp, Artificial
  Barcode component
  misc_feature (33)..(34): n is a, c, g, or t
  misc_feature (43)..(44): n is a, c, g, or t
  misc_feature (53)..(54): n is a, c, g, or t
tttttttaagcagtggtatcaacgcagagtacnnaaggaggtnnaacgacctnntttttttttttttttttttttttttttttt

SEQ ID NO: 3777 - DNA, 84 bp, Artificial
  Barcode component
  misc_feature (33)..(34): n is a, c, g, or t
  misc_feature (43)..(44): n is a, c, g, or t
  misc_feature (53)..(54): n is a, c, g, or t
tttttttaagcagtggtatcaacgcagagtacnnaaggaggtnnatcaggctnntttttttttttttttttttttttttttttt

SEQ ID NO: 3778 - DNA, 84 bp, Artificial
  Barcode component
  misc_feature (33)..(34): n is a, c, g, or t
  misc_feature (43)..(44): n is a, c, g, or t
  misc_feature (53)..(54): n is a, c, g, or t
tttttttaagcagtggtatcaacgcagagtacnnaaggaggtnncaagttcgnntttttttttttttttttttttttttttttt

SEQ ID NO: 3779 - DNA, 84 bp, Artificial
  Barcode component
  misc_feature (33)..(34): n is a, c, g, or t
  misc_feature (43)..(44): n is a, c, g, or t
  misc_feature (53)..(54): n is a, c, g, or t
tttttttaagcagtggtatcaacgcagagtacnnaaggaggtnntagccaganntttttttttttttttttttttttttttttt

SEQ ID NO: 3780 - DNA, 84 bp, Artificial
  Barcode component
  misc_feature (33)..(34): n is a, c, g, or t
  misc_feature (43)..(44): n is a, c, g, or t
  misc_feature (53)..(54): n is a, c, g, or t
tttttttaagcagtggtatcaacgcagagtacnnaaggaggtnncaatcacgnntttttttttttttttttttttttttttttt

SEQ ID NO: 3781 - DNA, 84 bp, Artificial
  Barcode component
  misc_feature (33)..(34): n is a, c, g, or t
  misc_feature (43)..(44): n is a, c, g, or t
  misc_feature (53)..(54): n is a, c, g, or t
tttttttaagcagtggtatcaacgcagagtacnnaaggaggtnngcaacaagnntttttttttttttttttttttttttttttt

SEQ ID NO: 3782 - DNA, 84 bp, Artificial
  Barcode component
  misc_feature (33)..(34): n is a, c, g, or t
  misc_feature (43)..(44): n is a, c, g, or t
  misc_feature (53)..(54): n is a, c, g, or t
tttttttaagcagtggtatcaacgcagagtacnnaaggaggtnncacgacaanntttttttttttttttttttttttttttttt

SEQ ID NO: 3783 - DNA, 84 bp, Artificial
  Barcode component
  misc_feature (33)..(34): n is a, c, g, or t
  misc_feature (43)..(44): n is a, c, g, or t
  misc_feature (53)..(54): n is a, c, g, or t
tttttttaagcagtggtatcaacgcagagtacnnaaggaggtnntacggaganntttttttttttttttttttttttttttttt

SEQ ID NO: 3784 - DNA, 84 bp, Artificial
  Barcode component
  misc_feature (33)..(34): n is a, c, g, or t
  misc_feature (43)..(44): n is a, c, g, or t
  misc_feature (53)..(54): n is a, c, g, or t
tttttttaagcagtggtatcaacgcagagtacnnaaggaggtnncgacaaganntttttttttttttttttttttttttttttt

SEQ ID NO: 3785 - DNA, 84 bp, Artificial
  Barcode component
  misc_feature (33)..(34): n is a, c, g, or t
  misc_feature (43)..(44): n is a, c, g, or t
  misc_feature (53)..(54): n is a, c, g, or t
tttttttaagcagtggtatcaacgcagagtacnnaaggaggtnncgaagtganntttttttttttttttttttttttttttttt

SEQ ID NO: 3786 - DNA, 84 bp, Artificial
  Barcode component
  misc_feature (33)..(34): n is a, c, g, or t
  misc_feature (43)..(44): n is a, c, g, or t
  misc_feature (53)..(54): n is a, c, g, or t
tttttttaagcagtggtatcaacgcagagtacnnaaggaggtnnagctggtanntttttttttttttttttttttttttttttt

SEQ ID NO: 3787 - DNA, 84 bp, Artificial
  Barcode component
  misc_feature (33)..(34): n is a, c, g, or t
  misc_feature (43)..(44): n is a, c, g, or t
  misc_feature (53)..(54): n is a, c, g, or t
tttttttaagcagtggtatcaacgcagagtacnnaaggaggtnnaactaggcnntttttttttttttttttttttttttttttt

SEQ ID NO: 3788 - DNA, 84 bp, Artificial
  Barcode component
  misc_feature (33)..(34): n is a, c, g, or t
  misc_feature (43)..(44): n is a, c, g, or t
  misc_feature (53)..(54): n is a, c, g, or t
tttttttaagcagtggtatcaacgcagagtacnnaaggaggtnncagcaagtnntttttttttttttttttttttttttttttt

SEQ ID NO: 3789 - DNA, 84 bp, Artificial
  Barcode component
  misc_feature (33)..(34): n is a, c, g, or t
  misc_feature (43)..(44): n is a, c, g, or t
  misc_feature (53)..(54): n is a, c, g, or t
tttttttaagcagtggtatcaacgcagagtacnnaaggaggtnnacgaggtanntttttttttttttttttttttttttttttt

SEQ ID NO: 3790 - DNA, 84 bp, Artificial
  Barcode component
  misc_feature (33)..(34): n is a, c, g, or t
  misc_feature (43)..(44): n is a, c, g, or t
  misc_feature (53)..(54): n is a, c, g, or t
tttttttaagcagtggtatcaacgcagagtacnnaaggaggtnncatcttccnntttttttttttttttttttttttttttttt

SEQ ID NO: 3791 - DNA, 84 bp, Artificial
  Barcode component
  misc_feature (33)..(34): n is a, c, g, or t
  misc_feature (43)..(44): n is a, c, g, or t
  misc_feature (53)..(54): n is a, c, g, or t
tttttttaagcagtggtatcaacgcagagtacnnaaggaggtnncctgaatcnntttttttttttttttttttttttttttttt

SEQ ID NO: 3792 - DNA, 84 bp, Artificial
  Barcode component
  misc_feature (33)..(34): n is a, c, g, or t
  misc_feature (43)..(44): n is a, c, g, or t
  misc_feature (53)..(54): n is a, c, g, or t
tttttttaagcagtggtatcaacgcagagtacnnaaggaggtnntgcagactnntttttttttttttttttttttttttttttt

SEQ ID NO: 3793 - DNA, 84 bp, Artificial
  Barcode component
  misc_feature (33)..(34): n is a, c, g, or t
  misc_feature (43)..(44): n is a, c, g, or t
  misc_feature (53)..(54): n is a, c, g, or t
tttttttaagcagtggtatcaacgcagagtacnnaaggaggtnnagatgtggnntttttttttttttttttttttttttttttt

SEQ ID NO: 3794 - DNA, 84 bp, Artificial
  Barcode component
  misc_feature (33)..(34): n is a, c, g, or t
  misc_feature (43)..(44): n is a, c, g, or t
  misc_feature (53)..(54): n is a, c, g, or t
tttttttaagcagtggtatcaacgcagagtacnnaaggaggtnnagttcgacnntttttttttttttttttttttttttttttt

SEQ ID NO: 3795 - DNA, 84 bp, Artificial
  Barcode component
  misc_feature (33)..(34): n is a, c, g, or t
  misc_feature (43)..(44): n is a, c, g, or t
  misc_feature (53)..(54): n is a, c, g, or t
tttttttaagcagtggtatcaacgcagagtacnnaaggaggtnnacaacctcnntttttttttttttttttttttttttttttt

SEQ ID NO: 3796 - DNA, 84 bp, Artificial
  Barcode component
  misc_feature (33)..(34): n is a, c, g, or t
  misc_feature (43)..(44): n is a, c, g, or t
  misc_feature (53)..(54): n is a, c, g, or t
tttttttaagcagtggtatcaacgcagagtacnnaaggaggtnncatggtagnntttttttttttttttttttttttttttttt

SEQ ID NO: 3797 - DNA, 84 bp, Artificial
  Barcode component
  misc_feature (33)..(34): n is a, c, g, or t
  misc_feature (43)..(44): n is a, c, g, or t
  misc_feature (53)..(54): n is a, c, g, or t
tttttttaagcagtggtatcaacgcagagtacnnaaggaggtnncgtatctcnntttttttttttttttttttttttttttttt

SEQ ID NO: 3798 - DNA, 84 bp, Artificial
  Barcode component
  misc_feature (33)..(34): n is a, c, g, or t
  misc_feature (43)..(44): n is a, c, g, or t
  misc_feature (53)..(54): n is a, c, g, or t
tttttttaagcagtggtatcaacgcagagtacnnaaggaggtnncctagttcnntttttttttttttttttttttttttttttt

SEQ ID NO: 3799 - DNA, 84 bp, Artificial
  Barcode component
  misc_feature (33)..(34): n is a, c, g, or t
  misc_feature (43)..(44): n is a, c, g, or t
  misc_feature (53)..(54): n is a, c, g, or t
tttttttaagcagtggtatcaacgcagagtacnnaaggaggtnncaagagtcnntttttttttttttttttttttttttttttt

SEQ ID NO: 3800 - DNA, 84 bp, Artificial
  Barcode component
  misc_feature (33)..(34): n is a, c, g, or t
  misc_feature (43)..(44): n is a, c, g, or t
  misc_feature (53)..(54): n is a, c, g, or t
tttttttaagcagtggtatcaacgcagagtacnnctggaatgnnaatcggcanntttttttttttttttttttttttttttttt

SEQ ID NO: 3801 - DNA, 84 bp, Artificial
  Barcode component
  misc_feature (33)..(34): n is a, c, g, or t
  misc_feature (43)..(44): n is a, c, g, or t
  misc_feature (53)..(54): n is a, c, g, or t
tttttttaagcagtggtatcaacgcagagtacnnctggaatgnntacggcatnntttttttttttttttttttttttttttttt

SEQ ID NO: 3802 - DNA, 84 bp, Artificial
  Barcode component
  misc_feature (33)..(34): n is a, c, g, or t
  misc_feature (43)..(44): n is a, c, g, or t
  misc_feature (53)..(54): n is a, c, g, or t
tttttttaagcagtggtatcaacgcagagtacnnctggaatgnnttggatcgnntttttttttttttttttttttttttttttt

SEQ ID NO: 3803 - DNA, 84 bp, Artificial
  Barcode component
  misc_feature (33)..(34): n is a, c, g, or t
  misc_feature (43)..(44): n is a, c, g, or t
  misc_feature (53)..(54): n is a, c, g, or t
tttttttaagcagtggtatcaacgcagagtacnnctggaatgnntggaacganntttttttttttttttttttttttttttttt

SEQ ID NO: 3804 - DNA, 84 bp, Artificial
  Barcode component
  misc_feature (33)..(34): n is a, c, g, or t
  misc_feature (43)..(44): n is a, c, g, or t
  misc_feature (53)..(54): n is a, c, g, or t
tttttttaagcagtggtatcaacgcagagtacnnctggaatgnnggcaatcanntttttttttttttttttttttttttttttt

SEQ ID NO: 3805 - DNA, 84 bp, Artificial
  Barcode component
  misc_feature (33)..(34): n is a, c, g, or t
  misc_feature (43)..(44): n is a, c, g, or t
  misc_feature (53)..(54): n is a, c, g, or t
tttttttaagcagtggtatcaacgcagagtacnnctggaatgnngaatccganntttttttttttttttttttttttttttttt

SEQ ID NO: 3806 - DNA, 84 bp, Artificial
  Barcode component
  misc_feature (33)..(34): n is a, c, g, or t
  misc_feature (43)..(44): n is a, c, g, or t
  misc_feature (53)..(54): n is a, c, g, or t
tttttttaagcagtggtatcaacgcagagtacnnctggaatgnnttacggtgnntttttttttttttttttttttttttttttt

SEQ ID NO: 3807 - DNA, 84 bp, Artificial
  Barcode component
  misc_feature (33)..(34): n is a, c, g, or t
  misc_feature (43)..(44): n is a, c, g, or t
  misc_feature (53)..(54): n is a, c, g, or t
tttttttaagcagtggtatcaacgcagagtacnnctggaatgnncatatcggnntttttttttttttttttttttttttttttt

SEQ ID NO: 3808 - DNA, 84 bp, Artificial
  Barcode component
  misc_feature (33)..(34): n is a, c, g, or t
  misc_feature (43)..(44): n is a, c, g, or t
  misc_feature (53)..(54): n is a, c, g, or t
tttttttaagcagtggtatcaacgcagagtacnnctggaatgnncttcggtanntttttttttttttttttttttttttttttt

SEQ ID NO: 3809 - DNA, 84 bp, Artificial
  Barcode component
  misc_feature (33)..(34): n is a, c, g, or t
  misc_feature (43)..(44): n is a, c, g, or t
  misc_feature (53)..(54): n is a, c, g, or t
tttttttaagcagtggtatcaacgcagagtacnnctggaatgnntcctaacgnntttttttttttttttttttttttttttttt

SEQ ID NO: 3810 - DNA, 84 bp, Artificial
  Barcode component
  misc_feature (33)..(34): n is a, c, g, or t
  misc_feature (43)..(44): n is a, c, g, or t
  misc_feature (53)..(54): n is a, c, g, or t
tttttttaagcagtggtatcaacgcagagtacnnctggaatgnngtaagccanntttttttttttttttttttttttttttttt

SEQ ID NO: 3811 - DNA, 84 bp, Artificial
  Barcode component
  misc_feature (33)..(34): n is a, c, g, or t
  misc_feature (43)..(44): n is a, c, g, or t
  misc_feature (53)..(54): n is a, c, g, or t
tttttttaagcagtggtatcaacgcagagtacnnctggaatgnntaaggtggnntttttttttttttttttttttttttttttt

SEQ ID NO: 3812 - DNA, 84 bp, Artificial
  Barcode component
  misc_feature (33)..(34): n is a, c, g, or t
  misc_feature (43)..(44): n is a, c, g, or t
  misc_feature (53)..(54): n is a, c, g, or t
tttttttaagcagtggtatcaacgcagagtacnnctggaatgnnggtaagctnntttttttttttttttttttttttttttttt

SEQ ID NO: 3813 - DNA, 84 bp, Artificial
  Barcode component
  misc_feature (33)..(34): n is a, c, g, or t
  misc_feature (43)..(44): n is a, c, g, or t
  misc_feature (53)..(54): n is a, c, g, or t
tttttttaagcagtggtatcaacgcagagtacnnctggaatgnntgtgtcganntttttttttttttttttttttttttttttt

SEQ ID NO: 3814 - DNA, 84 bp, Artificial
  Barcode component
  misc_feature (33)..(34): n is a, c, g, or t
  misc_feature (43)..(44): n is a, c, g, or t
  misc_feature (53)..(54): n is a, c, g, or t
tttttttaagcagtggtatcaacgcagagtacnnctggaatgnngagcatganntttttttttttttttttttttttttttttt

SEQ ID NO: 3815 - DNA, 84 bp, Artificial
  Barcode component
  misc_feature (33)..(34): n is a, c, g, or t
  misc_feature (43)..(44): n is a, c, g, or t
  misc_feature (53)..(54): n is a, c, g, or t
tttttttaagcagtggtatcaacgcagagtacnnctggaatgnntcgaagtcnntttttttttttttttttttttttttttttt

SEQ ID NO: 3816 - DNA, 84 bp, Artificial
  Barcode component
  misc_feature (33)..(34): n is a, c, g, or t
  misc_feature (43)..(44): n is a, c, g, or t
  misc_feature (53)..(54): n is a, c, g, or t
tttttttaagcagtggtatcaacgcagagtacnnctggaatgnnggtgaacanntttttttttttttttttttttttttttttt

SEQ ID NO: 3817 - DNA, 84 bp, Artificial
  Barcode component
  misc_feature (33)..(34): n is a, c, g, or t
  misc_feature (43)..(44): n is a, c, g, or t
  misc_feature (53)..(54): n is a, c, g, or t
tttttttaagcagtggtatcaacgcagagtacnnctggaatgnnacatgcacnntttttttttttttttttttttttttttttt

SEQ ID NO: 3818 - DNA, 84 bp, Artificial
  Barcode component
  misc_feature (33)..(34): n is a, c, g, or t
  misc_feature (43)..(44): n is a, c, g, or t
  misc_feature (53)..(54): n is a, c, g, or t
tttttttaagcagtggtatcaacgcagagtacnnctggaatgnnccaacagtnntttttttttttttttttttttttttttttt

SEQ ID NO: 3819 - DNA, 84 bp, Artificial
  Barcode component
  misc_feature (33)..(34): n is a, c, g, or t
  misc_feature (43)..(44): n is a, c, g, or t
  misc_feature (53)..(54): n is a, c, g, or t
tttttttaagcagtggtatcaacgcagagtacnnctggaatgnnagaacagcnntttttttttttttttttttttttttttttt

SEQ ID NO: 3820 - DNA, 84 bp, Artificial
  Barcode component
  misc_feature (33)..(34): n is a, c, g, or t
  misc_feature (43)..(44): n is a, c, g, or t
  misc_feature (53)..(54): n is a, c, g, or t
tttttttaagcagtggtatcaacgcagagtacnnctggaatgnngaacacgtnntttttttttttttttttttttttttttttt

SEQ ID NO: 3821 - DNA, 84 bp, Artificial
  Barcode component
  misc_feature (33)..(34): n is a, c, g, or t
  misc_feature (43)..(44): n is a, c, g, or t
  misc_feature (53)..(54): n is a, c, g, or t
tttttttaagcagtggtatcaacgcagagtacnnctggaatgnnggtcttcanntttttttttttttttttttttttttttttt

SEQ ID NO: 3822 - DNA, 84 bp, Artificial
  Barcode component
  misc_feature (33)..(34): n is a, c, g, or t
  misc_feature (43)..(44): n is a, c, g, or t
  misc_feature (53)..(54): n is a, c, g, or t
tttttttaagcagtggtatcaacgcagagtacnnctggaatgnnaggttcagnntttttttttttttttttttttttttttttt

SEQ ID NO: 3823 - DNA, 84 bp, Artificial
  Barcode component
  misc_feature (33)..(34): n is a, c, g, or t
  misc_feature (43)..(44): n is a, c, g, or t
  misc_feature (53)..(54): n is a, c, g, or t
tttttttaagcagtggtatcaacgcagagtacnnctggaatgnnctagagcanntttttttttttttttttttttttttttttt

SEQ ID NO: 3824 - DNA, 84 bp, Artificial
  Barcode component
  misc_feature (33)..(34): n is a, c, g, or t
  misc_feature (43)..(44): n is a, c, g, or t
  misc_feature (53)..(54): n is a, c, g, or t
tttttttaagcagtggtatcaacgcagagtacnnctggaatgnncttctagcnntttttttttttttttttttttttttttttt

SEQ ID NO: 3825 - DNA, 84 bp, Artificial
  Barcode component
  misc_feature (33)..(34): n is a, c, g, or t
  misc_feature (43)..(44): n is a, c, g, or t
  misc_feature (53)..(54): n is a, c, g, or t
tttttttaagcagtggtatcaacgcagagtacnnctggaatgnngagtaacgnntttttttttttttttttttttttttttttt

SEQ ID NO: 3826 - DNA, 84 bp, Artificial
  Barcode component
  misc_feature (33)..(34): n is a, c, g, or t
  misc_feature (43)..(44): n is a, c, g, or t
  misc_feature (53)..(54): n is a, c, g, or t
tttttttaagcagtggtatcaacgcagagtacnnctggaatgnnctaagaggnntttttttttttttttttttttttttttttt

SEQ ID NO: 3827 - DNA, 84 bp, Artificial
  Barcode component
  misc_feature (33)..(34): n is a, c, g, or t
  misc_feature (43)..(44): n is a, c, g, or t
  misc_feature (53)..(54): n is a, c, g, or t
tttttttaagcagtggtatcaacgcagagtacnnctggaatgnnacgtgtagnntttttttttttttttttttttttttttttt

SEQ ID NO: 3828 - DNA, 84 bp, Artificial
  Barcode component
  misc_feature (33)..(34): n is a, c, g, or t
  misc_feature (43)..(44): n is a, c, g, or t
  misc_feature (53)..(54): n is a, c, g, or t
tttttttaagcagtggtatcaacgcagagtacnnctggaatgnnactacaggnntttttttttttttttttttttttttttttt

SEQ ID NO: 3829 - DNA, 84 bp, Artificial
  Barcode component
  misc_feature (33)..(34): n is a, c, g, or t
  misc_feature (43)..(44): n is a, c, g, or t
  misc_feature (53)..(54): n is a, c, g, or t
tttttttaagcagtggtatcaacgcagagtacnnctggaatgnntacaggtcnntttttttttttttttttttttttttttttt

SEQ ID NO: 3830 - DNA, 84 bp, Artificial
  Barcode component
  misc_feature (33)..(34): n is a, c, g, or t
  misc_feature (43)..(44): n is a, c, g, or t
  misc_feature (53)..(54): n is a, c, g, or t
tttttttaagcagtggtatcaacgcagagtacnnctggaatgnnctcacatgnntttttttttttttttttttttttttttttt

SEQ ID NO: 3831 - DNA, 84 bp, Artificial
  Barcode component
  misc_feature (33)..(34): n is a, c, g, or t
  misc_feature (43)..(44): n is a, c, g, or t
  misc_feature (53)..(54): n is a, c, g, or t
tttttttaagcagtggtatcaacgcagagtacnnctggaatgnnactaggagnntttttttttttttttttttttttttttttt

SEQ ID NO: 3832 - DNA, 84 bp, Artificial
  Barcode component
  misc_feature (33)..(34): n is a, c, g, or t
  misc_feature (43)..(44): n is a, c, g, or t
  misc_feature (53)..(54): n is a, c, g, or t
tttttttaagcagtggtatcaacgcagagtacnnctggaatgnnccatagganntttttttttttttttttttttttttttttt

SEQ ID NO: 3833 - DNA, 84 bp, Artificial
  Barcode component
  misc_feature (33)..(34): n is a, c, g, or t
  misc_feature (43)..(44): n is a, c, g, or t
  misc_feature (53)..(54): n is a, c, g, or t
tttttttaagcagtggtatcaacgcagagtacnnctggaatgnnggagaatcnntttttttttttttttttttttttttttttt

SEQ ID NO: 3834 - DNA, 84 bp, Artificial
  Barcode component
  misc_feature (33)..(34): n is a, c, g, or t
  misc_feature (43)..(44): n is a, c, g, or t
  misc_feature (53)..(54): n is a, c, g, or t
tttttttaagcagtggtatcaacgcagagtacnnctggaatgnngccaagaanntttttttttttttttttttttttttttttt

SEQ ID NO: 3835 - DNA, 84 bp, Artificial
  Barcode component
  misc_feature (33)..(34): n is a, c, g, or t
  misc_feature (43)..(44): n is a, c, g, or t
  misc_feature (53)..(54): n is a, c, g, or t
tttttttaagcagtggtatcaacgcagagtacnnctggaatgnnaaggcaagnntttttttttttttttttttttttttttttt

SEQ ID NO: 3836 - DNA, 84 bp, Artificial
  Barcode component
  misc_feature (33)..(34): n is a, c, g, or t
  misc_feature (43)..(44): n is a, c, g, or t
  misc_feature (53)..(54): n is a, c, g, or t
tttttttaagcagtggtatcaacgcagagtacnnctggaatgnnaatgtcgcnntttttttttttttttttttttttttttttt

SEQ ID NO: 3837 - DNA, 84 bp, Artificial
  Barcode component
  misc_feature (33)..(34): n is a, c, g, or t
  misc_feature (43)..(44): n is a, c, g, or t
  misc_feature (53)..(54): n is a, c, g, or t
tttttttaagcagtggtatcaacgcagagtacnnctggaatgnnatggaaccnntttttttttttttttttttttttttttttt

SEQ ID NO: 3838 - DNA, 84 bp, Artificial
  Barcode component
  misc_feature (33)..(34): n is a, c, g, or t
  misc_feature (43)..(44): n is a, c, g, or t
  misc_feature (53)..(54): n is a, c, g, or t
tttttttaagcagtggtatcaacgcagagtacnnctggaatgnnagaggcatnntttttttttttttttttttttttttttttt

SEQ ID NO: 3839 - DNA, 84 bp, Artificial
  Barcode component
  misc_feature (33)..(34): n is a, c, g, or t
  misc_feature (43)..(44): n is a, c, g, or t
  misc_feature (53)..(54): n is a, c, g, or t
tttttttaagcagtggtatcaacgcagagtacnnctggaatgnntgcatagcnntttttttttttttttttttttttttttttt

SEQ ID NO: 3840 - DNA, 84 bp, Artificial
  Barcode component
  misc_feature (33)..(34): n is a, c, g, or t
  misc_feature (43)..(44): n is a, c, g, or t
  misc_feature (53)..(54): n is a, c, g, or t
tttttttaagcagtggtatcaacgcagagtacnnctggaatgnnctaacgganntttttttttttttttttttttttttttttt

SEQ ID NO: 3841 - DNA, 84 bp, Artificial
  Barcode component
  misc_feature (33)..(34): n is a, c, g, or t
  misc_feature (43)..(44): n is a, c, g, or t
  misc_feature (53)..(54): n is a, c, g, or t
tttttttaagcagtggtatcaacgcagagtacnnctggaatgnntatcgaggnntttttttttttttttttttttttttttttt

SEQ ID NO: 3842 - DNA, 84 bp, Artificial
  Barcode component
  misc_feature (33)..(34): n is a, c, g, or t
  misc_feature (43)..(44): n is a, c, g, or t
  misc_feature (53)..(54): n is a, c, g, or t
tttttttaagcagtggtatcaacgcagagtacnnctggaatgnncatagcctnntttttttttttttttttttttttttttttt

SEQ ID NO: 3843 - DNA, 84 bp, Artificial
  Barcode component
  misc_feature (33)..(34): n is a, c, g, or t
  misc_feature (43)..(44): n is a, c, g, or t
  misc_feature (53)..(54): n is a, c, g, or t
tttttttaagcagtggtatcaacgcagagtacnnctggaatgnnatcgagacnntttttttttttttttttttttttttttttt

SEQ ID NO: 3844 - DNA, 84 bp, Artificial
  Barcode component
  misc_feature (33)..(34): n is a, c, g, or t
  misc_feature (43)..(44): n is a, c, g, or t
  misc_feature (53)..(54): n is a, c, g, or t
tttttttaagcagtggtatcaacgcagagtacnnctggaatgnnggaagagtnntttttttttttttttttttttttttttttt

SEQ ID NO: 3845 - DNA, 84 bp, Artificial
  Barcode component
  misc_feature (33)..(34): n is a, c, g, or t
  misc_feature (43)..(44): n is a, c, g, or t
  misc_feature (53)..(54): n is a, c, g, or t
tttttttaagcagtggtatcaacgcagagtacnnctggaatgnnccaagtagnntttttttttttttttttttttttttttttt

SEQ ID NO: 3846 - DNA, 84 bp, Artificial
  Barcode component
  misc_feature (33)..(34): n is a, c, g, or t
  misc_feature (43)..(44): n is a, c, g, or t
  misc_feature (53)..(54): n is a, c, g, or t
tttttttaagcagtggtatcaacgcagagtacnnctggaatgnnctgaacagnntttttttttttttttttttttttttttttt

SEQ ID NO: 3847 - DNA, 84 bp, Artificial
  Barcode component
  misc_feature (33)..(34): n is a, c, g, or t
  misc_feature (43)..(44): n is a, c, g, or t
  misc_feature (53)..(54): n is a, c, g, or t
tttttttaagcagtggtatcaacgcagagtacnnctggaatgnngtaggttcnntttttttttttttttttttttttttttttt

SEQ ID NO: 3848 - DNA, 84 bp, Artificial
  Barcode component
  misc_feature (33)..(34): n is a, c, g, or t
  misc_feature (43)..(44): n is a, c, g, or t
  misc_feature (53)..(54): n is a, c, g, or t
tttttttaagcagtggtatcaacgcagagtacnnctggaatgnngtatggacnntttttttttttttttttttttttttttttt

SEQ ID NO: 3849 - DNA, 84 bp, Artificial
  Barcode component
  misc_feature (33)..(34): n is a, c, g, or t
  misc_feature (43)..(44): n is a, c, g, or t
  misc_feature (53)..(54): n is a, c, g, or t
tttttttaagcagtggtatcaacgcagagtacnnctggaatgnntcgcaacanntttttttttttttttttttttttttttttt

SEQ ID NO: 3850 - DNA, 84 bp, Artificial
  Barcode component
  misc_feature (33)..(34): n is a, c, g, or t
  misc_feature (43)..(44): n is a, c, g, or t
  misc_feature (53)..(54): n is a, c, g, or t
tttttttaagcagtggtatcaacgcagagtacnnctggaatgnnccgctaatnntttttttttttttttttttttttttttttt

SEQ ID NO: 3851 - DNA, 84 bp, Artificial
  Barcode component
  misc_feature (33)..(34): n is a, c, g, or t
  misc_feature (43)..(44): n is a, c, g, or t
  misc_feature (53)..(54): n is a, c, g, or t
tttttttaagcagtggtatcaacgcagagtacnnctggaatgnngattcgcanntttttttttttttttttttttttttttttt

SEQ ID NO: 3852 - DNA, 84 bp, Artificial
  Barcode component
  misc_feature (33)..(34): n is a, c, g, or t
  misc_feature (43)..(44): n is a, c, g, or t
  misc_feature (53)..(54): n is a, c, g, or t
tttttttaagcagtggtatcaacgcagagtacnnctggaatgnncgatggaanntttttttttttttttttttttttttttttt

SEQ ID NO: 3853 - DNA, 84 bp, Artificial
  Barcode component
  misc_feature (33)..(34): n is a, c, g, or t
  misc_feature (43)..(44): n is a, c, g, or t
  misc_feature (53)..(54): n is a, c, g, or t
tttttttaagcagtggtatcaacgcagagtacnnctggaatgnnagcaagganntttttttttttttttttttttttttttttt

SEQ ID NO: 3854 - DNA, 84 bp, Artificial
  Barcode component
  misc_feature (33)..(34): n is a, c, g, or t
  misc_feature (43)..(44): n is a, c, g, or t
  misc_feature (53)..(54): n is a, c, g, or t
tttttttaagcagtggtatcaacgcagagtacnnctggaatgnncgtagcaanntttttttttttttttttttttttttttttt

SEQ ID NO: 3855 - DNA, 84 bp, Artificial
  Barcode component
  misc_feature (33)..(34): n is a, c, g, or t
  misc_feature (43)..(44): n is a, c, g, or t
  misc_feature (53)..(54): n is a, c, g, or t
tttttttaagcagtggtatcaacgcagagtacnnctggaatgnntggcagtanntttttttttttttttttttttttttttttt

SEQ ID NO: 3856 - DNA, 84 bp, Artificial
  Barcode component
  misc_feature (33)..(34): n is a, c, g, or t
  misc_feature (43)..(44): n is a, c, g, or t
  misc_feature (53)..(54): n is a, c, g, or t
tttttttaagcagtggtatcaacgcagagtacnnctggaatgnncggtagttnntttttttttttttttttttttttttttttt

SEQ ID NO: 3857 - DNA, 84 bp, Artificial
  Barcode component
  misc_feature (33)..(34): n is a, c, g, or t
  misc_feature (43)..(44): n is a, c, g, or t
  misc_feature (53)..(54): n is a, c, g, or t
tttttttaagcagtggtatcaacgcagagtacnnctggaatgnntgacttcgnntttttttttttttttttttttttttttttt

SEQ ID NO: 3858 - DNA, 84 bp, Artificial
  Barcode component
  misc_feature (33)..(34): n is a, c, g, or t
  misc_feature (43)..(44): n is a, c, g, or t
  misc_feature (53)..(54): n is a, c, g, or t
tttttttaagcagtggtatcaacgcagagtacnnctggaatgnngagtgcaanntttttttttttttttttttttttttttttt

SEQ ID NO: 3859 - DNA, 84 bp, Artificial
  Barcode component
  misc_feature (33)..(34): n is a, c, g, or t
  misc_feature (43)..(44): n is a, c, g, or t
  misc_feature (53)..(54): n is a, c, g, or t
tttttttaagcagtggtatcaacgcagagtacnnctggaatgnnacggtaacnntttttttttttttttttttttttttttttt

SEQ ID NO: 3860 - DNA, 84 bp, Artificial
  Barcode component
  misc_feature (33)..(34): n is a, c, g, or t
  misc_feature (43)..(44): n is a, c, g, or t
  misc_feature (53)..(54): n is a, c, g, or t
tttttttaagcagtggtatcaacgcagagtacnnctggaatgnnaagtggtgnntttttttttttttttttttttttttttttt

SEQ ID NO: 3861 - DNA, 84 bp, Artificial
  Barcode component
  misc_feature (33)..(34): n is a, c, g, or t
  misc_feature (43)..(44): n is a, c, g, or t
  misc_feature (53)..(54): n is a, c, g, or t
tttttttaagcagtggtatcaacgcagagtacnnctggaatgnnggagacaanntttttttttttttttttttttttttttttt

SEQ ID NO: 3862 - DNA, 84 bp, Artificial
  Barcode component
  misc_feature (33)..(34): n is a, c, g, or t
  misc_feature (43)..(44): n is a, c, g, or t
  misc_feature (53)..(54): n is a, c, g, or t
tttttttaagcagtggtatcaacgcagagtacnnctggaatgnntcaaggacnntttttttttttttttttttttttttttttt

SEQ ID NO: 3863 - DNA, 84 bp, Artificial
  Barcode component
  misc_feature (33)..(34): n is a, c, g, or t
  misc_feature (43)..(44): n is a, c, g, or t
  misc_feature (53)..(54): n is a, c, g, or t
tttttttaagcagtggtatcaacgcagagtacnnctggaatgnnaagagagcnntttttttttttttttttttttttttttttt

SEQ ID NO: 3864 - DNA, 84 bp, Artificial
  Barcode component
  misc_feature (33)..(34): n is a, c, g, or t
  misc_feature (43)..(44): n is a, c, g, or t
  misc_feature (53)..(54): n is a, c, g, or t
tttttttaagcagtggtatcaacgcagagtacnnctggaatgnncgagagatnntttttttttttttttttttttttttttttt

SEQ ID NO: 3865 - DNA, 84 bp, Artificial
  Barcode component
  misc_feature (33)..(34): n is a, c, g, or t
  misc_feature (43)..(44): n is a, c, g, or t
  misc_feature (53)..(54): n is a, c, g, or t
tttttttaagcagtggtatcaacgcagagtacnnctggaatgnnacagatggnntttttttttttttttttttttttttttttt

SEQ ID NO: 3866 - DNA, 84 bp, Artificial
  Barcode component
  misc_feature (33)..(34): n is a, c, g, or t
  misc_feature (43)..(44): n is a, c, g, or t
  misc_feature (53)..(54): n is a, c, g, or t
tttttttaagcagtggtatcaacgcagagtacnnctggaatgnnaggagtcanntttttttttttttttttttttttttttttt

SEQ ID NO: 3867 - DNA, 84 bp, Artificial
  Barcode component
  misc_feature (33)..(34): n is a, c, g, or t
  misc_feature (43)..(44): n is a, c, g, or t
  misc_feature (53)..(54): n is a, c, g, or t
tttttttaagcagtggtatcaacgcagagtacnnctggaatgnncgtgttacnntttttttttttttttttttttttttttttt

SEQ ID NO: 3868 - DNA, 84 bp, Artificial
  Barcode component
  misc_feature (33)..(34): n is a, c, g, or t
  misc_feature (43)..(44): n is a, c, g, or t
  misc_feature (53)..(54): n is a, c, g, or t
tttttttaagcagtggtatcaacgcagagtacnnctggaatgnntagtgtgcnntttttttttttttttttttttttttttttt

SEQ ID NO: 3869 - DNA, 84 bp, Artificial
  Barcode component
  misc_feature (33)..(34): n is a, c, g, or t
  misc_feature (43)..(44): n is a, c, g, or t
  misc_feature (53)..(54): n is a, c, g, or t
tttttttaagcagtggtatcaacgcagagtacnnctggaatgnnctcatgacnntttttttttttttttttttttttttttttt

SEQ ID NO: 3870 - DNA, 84 bp, Artificial
  Barcode component
  misc_feature (33)..(34): n is a, c, g, or t
  misc_feature (43)..(44): n is a, c, g, or t
  misc_feature (53)..(54): n is a, c, g, or t
tttttttaagcagtggtatcaacgcagagtacnnctggaatgnngtatccagnntttttttttttttttttttttttttttttt

SEQ ID NO: 3871 - DNA, 84 bp, Artificial
  Barcode component
  misc_feature (33)..(34): n is a, c, g, or t
  misc_feature (43)..(44): n is a, c, g, or t
  misc_feature (53)..(54): n is a, c, g, or t
tttttttaagcagtggtatcaacgcagagtacnnctggaatgnnacgcctatnntttttttttttttttttttttttttttttt

SEQ ID NO: 3872 - DNA, 84 bp, Artificial
  Barcode component
  misc_feature (33)..(34): n is a, c, g, or t
  misc_feature (43)..(44): n is a, c, g, or t
  misc_feature (53)..(54): n is a, c, g, or t
tttttttaagcagtggtatcaacgcagagtacnnctggaatgnnaacgacctnntttttttttttttttttttttttttttttt

SEQ ID NO: 3873 - DNA, 84 bp, Artificial
  Barcode component
  misc_feature (33)..(34): n is a, c, g, or t
  misc_feature (43)..(44): n is a, c, g, or t
  misc_feature (53)..(54): n is a, c, g, or t
tttttttaagcagtggtatcaacgcagagtacnnctggaatgnnatcaggctnntttttttttttttttttttttttttttttt

SEQ ID NO: 3874 - DNA, 84 bp, Artificial
  Barcode component
  misc_feature (33)..(34): n is a, c, g, or t
  misc_feature (43)..(44): n is a, c, g, or t
  misc_feature (53)..(54): n is a, c, g, or t
tttttttaagcagtggtatcaacgcagagtacnnctggaatgnncaagttcgnntttttttttttttttttttttttttttttt

SEQ ID NO: 3875 - DNA, 84 bp, Artificial
  Barcode component
  misc_feature (33)..(34): n is a, c, g, or t
  misc_feature (43)..(44): n is a, c, g, or t
  misc_feature (53)..(54): n is a, c, g, or t
tttttttaagcagtggtatcaacgcagagtacnnctggaatgnntagccaganntttttttttttttttttttttttttttttt

SEQ ID NO: 3876 - DNA, 84 bp, Artificial
  Barcode component
  misc_feature (33)..(34): n is a, c, g, or t
  misc_feature (43)..(44): n is a, c, g, or t
  misc_feature (53)..(54): n is a, c, g, or t
tttttttaagcagtggtatcaacgcagagtacnnctggaatgnncaatcacgnntttttttttttttttttttttttttttttt

SEQ ID NO: 3877 - DNA, 84 bp, Artificial
  Barcode component
  misc_feature (33)..(34): n is a, c, g, or t
  misc_feature (43)..(44): n is a, c, g, or t
  misc_feature (53)..(54): n is a, c, g, or t
tttttttaagcagtggtatcaacgcagagtacnnctggaatgnngcaacaagnntttttttttttttttttttttttttttttt

SEQ ID NO: 3878 - DNA, 84 bp, Artificial
  Barcode component
  misc_feature (33)..(34): n is a, c, g, or t
  misc_feature (43)..(44): n is a, c, g, or t
  misc_feature (53)..(54): n is a, c, g, or t
tttttttaagcagtggtatcaacgcagagtacnnctggaatgnncacgacaanntttttttttttttttttttttttttttttt

SEQ ID NO: 3879 - DNA, 84 bp, Artificial
  Barcode component
  misc_feature (33)..(34): n is a, c, g, or t
  misc_feature (43)..(44): n is a, c, g, or t
  misc_feature (53)..(54): n is a, c, g, or t
tttttttaagcagtggtatcaacgcagagtacnnctggaatgnntacggaganntttttttttttttttttttttttttttttt

SEQ ID NO: 3880 - DNA, 84 bp, Artificial
  Barcode component
  misc_feature (33)..(34): n is a, c, g, or t
  misc_feature (43)..(44): n is a, c, g, or t
  misc_feature (53)..(54): n is a, c, g, or t
tttttttaagcagtggtatcaacgcagagtacnnctggaatgnncgacaaganntttttttttttttttttttttttttttttt

SEQ ID NO: 3881 - DNA, 84 bp, Artificial
  Barcode component
  misc_feature (33)..(34): n is a, c, g, or t
  misc_feature (43)..(44): n is a, c, g, or t
  misc_feature (53)..(54): n is a, c, g, or t
tttttttaagcagtggtatcaacgcagagtacnnctggaatgnncgaagtganntttttttttttttttttttttttttttttt

SEQ ID NO: 3882 - DNA, 84 bp, Artificial
  Barcode component
  misc_feature (33)..(34): n is a, c, g, or t
  misc_feature (43)..(44): n is a, c, g, or t
  misc_feature (53)..(54): n is a, c, g, or t
tttttttaagcagtggtatcaacgcagagtacnnctggaatgnnagctggtanntttttttttttttttttttttttttttttt

SEQ ID NO: 3883 - DNA, 84 bp, Artificial
  Barcode component
  misc_feature (33)..(34): n is a, c, g, or t
  misc_feature (43)..(44): n is a, c, g, or t
  misc_feature (53)..(54): n is a, c, g, or t
tttttttaagcagtggtatcaacgcagagtacnnctggaatgnnaactaggcnntttttttttttttttttttttttttttttt

SEQ ID NO: 3884 - DNA, 84 bp, Artificial
  Barcode component
  misc_feature (33)..(34): n is a, c, g, or t
  misc_feature (43)..(44): n is a, c, g, or t
  misc_feature (53)..(54): n is a, c, g, or t
tttttttaagcagtggtatcaacgcagagtacnnctggaatgnncagcaagtnntttttttttttttttttttttttttttttt

SEQ ID NO: 3885 - DNA, 84 bp, Artificial
  Barcode component
  misc_feature (33)..(34): n is a, c, g, or t
  misc_feature (43)..(44): n is a, c, g, or t
  misc_feature (53)..(54): n is a, c, g, or t
tttttttaagcagtggtatcaacgcagagtacnnctggaatgnnacgaggtanntttttttttttttttttttttttttttttt

SEQ ID NO: 3886 - DNA, 84 bp, Artificial
  Barcode component
  misc_feature (33)..(34): n is a, c, g, or t
  misc_feature (43)..(44): n is a, c, g, or t
  misc_feature (53)..(54): n is a, c, g, or t
tttttttaagcagtggtatcaacgcagagtacnnctggaatgnncatcttccnntttttttttttttttttttttttttttttt

SEQ ID NO: 3887 - DNA, 84 bp, Artificial
  Barcode component
  misc_feature (33)..(34): n is a, c, g, or t
  misc_feature (43)..(44): n is a, c, g, or t
  misc_feature (53)..(54): n is a, c, g, or t
tttttttaagcagtggtatcaacgcagagtacnnctggaatgnncctgaatcnntttttttttttttttttttttttttttttt

SEQ ID NO: 3888 - DNA, 84 bp, Artificial
  Barcode component
  misc_feature (33)..(34): n is a, c, g, or t
  misc_feature (43)..(44): n is a, c, g, or t
  misc_feature (53)..(54): n is a, c, g, or t
tttttttaagcagtggtatcaacgcagagtacnnctggaatgnntgcagactnntttttttttttttttttttttttttttttt

SEQ ID NO: 3889 - DNA, 84 bp, Artificial
  Barcode component
  misc_feature (33)..(34): n is a, c, g, or t
  misc_feature (43)..(44): n is a, c, g, or t
  misc_feature (53)..(54): n is a, c, g, or t
tttttttaagcagtggtatcaacgcagagtacnnctggaatgnnagatgtggnntttttttttttttttttttttttttttttt

SEQ ID NO: 3890 - DNA, 84 bp, Artificial
  Barcode component
  misc_feature (33)..(34): n is a, c, g, or t
  misc_feature (43)..(44): n is a, c, g, or t
  misc_feature (53)..(54): n is a, c, g, or t
tttttttaagcagtggtatcaacgcagagtacnnctggaatgnnagttcgacnntttttttttttttttttttttttttttttt

SEQ ID NO: 3891 - DNA, 84 bp, Artificial
  Barcode component
  misc_feature (33)..(34): n is a, c, g, or t
  misc_feature (43)..(44): n is a, c, g, or t
  misc_feature (53)..(54): n is a, c, g, or t
tttttttaagcagtggtatcaacgcagagtacnnctggaatgnnacaacctcnntttttttttttttttttttttttttttttt

SEQ ID NO: 3892 - DNA, 84 bp, Artificial
  Barcode component
  misc_feature (33)..(34): n is a, c, g, or t
  misc_feature (43)..(44): n is a, c, g, or t
  misc_feature (53)..(54): n is a, c, g, or t
tttttttaagcagtggtatcaacgcagagtacnnctggaatgnncatggtagnntttttttttttttttttttttttttttttt

SEQ ID NO: 3893 - DNA, 84 bp, Artificial
  Barcode component
  misc_feature (33)..(34): n is a, c, g, or t
  misc_feature (43)..(44): n is a, c, g, or t
  misc_feature (53)..(54): n is a, c, g, or t
tttttttaagcagtggtatcaacgcagagtacnnctggaatgnncgtatctcnntttttttttttttttttttttttttttttt

SEQ ID NO: 3894 - DNA, 84 bp, Artificial
  Barcode component
  misc_feature (33)..(34): n is a, c, g, or t
  misc_feature (43)..(44): n is a, c, g, or t
  misc_feature (53)..(54): n is a, c, g, or t
tttttttaagcagtggtatcaacgcagagtacnnctggaatgnncctagttcnntttttttttttttttttttttttttttttt

SEQ ID NO: 3895 - DNA, 84 bp, Artificial
  Barcode component
  misc_feature (33)..(34): n is a, c, g, or t
  misc_feature (43)..(44): n is a, c, g, or t
  misc_feature (53)..(54): n is a, c, g, or t
tttttttaagcagtggtatcaacgcagagtacnnctggaatgnncaagagtcnntttttttttttttttttttttttttttttt

SEQ ID NO: 3896 - DNA, 84 bp, Artificial
  Barcode component
  misc_feature (33)..(34): n is a, c, g, or t
  misc_feature (43)..(44): n is a, c, g, or t
  misc_feature (53)..(54): n is a, c, g, or t
tttttttaagcagtggtatcaacgcagagtacnnacgacttgnnaatcggcanntttttttttttttttttttttttttttttt

SEQ ID NO: 3897 - DNA, 84 bp, Artificial
  Barcode component
  misc_feature (33)..(34): n is a, c, g, or t
  misc_feature (43)..(44): n is a, c, g, or t
  misc_feature (53)..(54): n is a, c, g, or t
tttttttaagcagtggtatcaacgcagagtacnnacgacttgnntacggcatnntttttttttttttttttttttttttttttt

SEQ ID NO: 3898 - DNA, 84 bp, Artificial
  Barcode component
  misc_feature (33)..(34): n is a, c, g, or t
  misc_feature (43)..(44): n is a, c, g, or t
  misc_feature (53)..(54): n is a, c, g, or t
tttttttaagcagtggtatcaacgcagagtacnnacgacttgnnttggatcgnntttttttttttttttttttttttttttttt

SEQ ID NO: 3899 - DNA, 84 bp, Artificial
  Barcode component
  misc_feature (33)..(34): n is a, c, g, or t
  misc_feature (43)..(44): n is a, c, g, or t
  misc_feature (53)..(54): n is a, c, g, or t
tttttttaagcagtggtatcaacgcagagtacnnacgacttgnntggaacganntttttttttttttttttttttttttttttt

SEQ ID NO: 3900 - DNA, 84 bp, Artificial
  Barcode component
  misc_feature (33)..(34): n is a, c, g, or t
  misc_feature (43)..(44): n is a, c, g, or t
  misc_feature (53)..(54): n is a, c, g, or t
tttttttaagcagtggtatcaacgcagagtacnnacgacttgnnggcaatcanntttttttttttttttttttttttttttttt

SEQ ID NO: 3901 - DNA, 84 bp, Artificial
  Barcode component
  misc_feature (33)..(34): n is a, c, g, or t
  misc_feature (43)..(44): n is a, c, g, or t
  misc_feature (53)..(54): n is a, c, g, or t
tttttttaagcagtggtatcaacgcagagtacnnacgacttgnngaatccganntttttttttttttttttttttttttttttt

SEQ ID NO: 3902 - DNA, 84 bp, Artificial
  Barcode component
  misc_feature (33)..(34): n is a, c, g, or t
  misc_feature (43)..(44): n is a, c, g, or t
  misc_feature (53)..(54): n is a, c, g, or t
tttttttaagcagtggtatcaacgcagagtacnnacgacttgnnttacggtgnntttttttttttttttttttttttttttttt

SEQ ID NO: 3903 - DNA, 84 bp, Artificial
  Barcode component
  misc_feature (33)..(34): n is a, c, g, or t
  misc_feature (43)..(44): n is a, c, g, or t
  misc_feature (53)..(54): n is a, c, g, or t
tttttttaagcagtggtatcaacgcagagtacnnacgacttgnncatatcggnntttttttttttttttttttttttttttttt

SEQ ID NO: 3904 - DNA, 84 bp, Artificial
  Barcode component
  misc_feature (33)..(34): n is a, c, g, or t
  misc_feature (43)..(44): n is a, c, g, or t
  misc_feature (53)..(54): n is a, c, g, or t
tttttttaagcagtggtatcaacgcagagtacnnacgacttgnncttcggtanntttttttttttttttttttttttttttttt

SEQ ID NO: 3905 - DNA, 84 bp, Artificial
  Barcode component
  misc_feature (33)..(34): n is a, c, g, or t
  misc_feature (43)..(44): n is a, c, g, or t
  misc_feature (53)..(54): n is a, c, g, or t
tttttttaagcagtggtatcaacgcagagtacnnacgacttgnntcctaacgnntttttttttttttttttttttttttttttt

SEQ ID NO: 3906 - DNA, 84 bp, Artificial
  Barcode component
  misc_feature (33)..(34): n is a, c, g, or t
  misc_feature (43)..(44): n is a, c, g, or t
  misc_feature (53)..(54): n is a, c, g, or t
tttttttaagcagtggtatcaacgcagagtacnnacgacttgnngtaagccanntttttttttttttttttttttttttttttt

SEQ ID NO: 3907 - DNA, 84 bp, Artificial
  Barcode component
  misc_feature (33)..(34): n is a, c, g, or t
  misc_feature (43)..(44): n is a, c, g, or t
  misc_feature (53)..(54): n is a, c, g, or t
tttttttaagcagtggtatcaacgcagagtacnnacgacttgnntaaggtggnntttttttttttttttttttttttttttttt

SEQ ID NO: 3908 - DNA, 84 bp, Artificial
  Barcode component
  misc_feature (33)..(34): n is a, c, g, or t
  misc_feature (43)..(44): n is a, c, g, or t
  misc_feature (53)..(54): n is a, c, g, or t
tttttttaagcagtggtatcaacgcagagtacnnacgacttgnnggtaagctnntttttttttttttttttttttttttttttt

SEQ ID NO: 3909 - DNA, 84 bp, Artificial
  Barcode component
  misc_feature (33)..(34): n is a, c, g, or t
  misc_feature (43)..(44): n is a, c, g, or t
  misc_feature (53)..(54): n is a, c, g, or t
tttttttaagcagtggtatcaacgcagagtacnnacgacttgnntgtgtcganntttttttttttttttttttttttttttttt

SEQ ID NO: 3910 - DNA, 84 bp, Artificial
  Barcode component
  misc_feature (33)..(34): n is a, c, g, or t
  misc_feature (43)..(44): n is a, c, g, or t
  misc_feature (53)..(54): n is a, c, g, or t
tttttttaagcagtggtatcaacgcagagtacnnacgacttgnngagcatganntttttttttttttttttttttttttttttt

SEQ ID NO: 3911 - DNA, 84 bp, Artificial
  Barcode component
  misc_feature (33)..(34): n is a, c, g, or t
  misc_feature (43)..(44): n is a, c, g, or t
  misc_feature (53)..(54): n is a, c, g, or t
tttttttaagcagtggtatcaacgcagagtacnnacgacttgnntcgaagtcnntttttttttttttttttttttttttttttt

SEQ ID NO: 3912 - DNA, 84 bp, Artificial
  Barcode component
  misc_feature (33)..(34): n is a, c, g, or t
  misc_feature (43)..(44): n is a, c, g, or t
  misc_feature (53)..(54): n is a, c, g, or t
tttttttaagcagtggtatcaacgcagagtacnnacgacttgnnggtgaacanntttttttttttttttttttttttttttttt

SEQ ID NO: 3913 - DNA, 84 bp, Artificial
  Barcode component
  misc_feature (33)..(34): n is a, c, g, or t
  misc_feature (43)..(44): n is a, c, g, or t
  misc_feature (53)..(54): n is a, c, g, or t
tttttttaagcagtggtatcaacgcagagtacnnacgacttgnnacatgcacnntttttttttttttttttttttttttttttt

SEQ ID NO: 3914 - DNA, 84 bp, Artificial
  Barcode component
  misc_feature (33)..(34): n is a, c, g, or t
  misc_feature (43)..(44): n is a, c, g, or t
  misc_feature (53)..(54): n is a, c, g, or t
tttttttaagcagtggtatcaacgcagagtacnnacgacttgnnccaacagtnntttttttttttttttttttttttttttttt

SEQ ID NO: 3915 - DNA, 84 bp, Artificial
  Barcode component
  misc_feature (33)..(34): n is a, c, g, or t
  misc_feature (43)..(44): n is a, c, g, or t
  misc_feature (53)..(54): n is a, c, g, or t
tttttttaagcagtggtatcaacgcagagtacnnacgacttgnnagaacagcnntttttttttttttttttttttttttttttt

SEQ ID NO: 3916 - DNA, 84 bp, Artificial
  Barcode component
  misc_feature (33)..(34): n is a, c, g, or t
  misc_feature (43)..(44): n is a, c, g, or t
  misc_feature (53)..(54): n is a, c, g, or t
tttttttaagcagtggtatcaacgcagagtacnnacgacttgnngaacacgtnntttttttttttttttttttttttttttttt

SEQ ID NO: 3917 - DNA, 84 bp, Artificial
  Barcode component
  misc_feature (33)..(34): n is a, c, g, or t
  misc_feature (43)..(44): n is a, c, g, or t
  misc_feature (53)..(54): n is a, c, g, or t
tttttttaagcagtggtatcaacgcagagtacnnacgacttgnnggtcttcanntttttttttttttttttttttttttttttt

SEQ ID NO: 3918 - DNA, 84 bp, Artificial
  Barcode component
  misc_feature (33)..(34): n is a, c, g, or t
  misc_feature (43)..(44): n is a, c, g, or t
  misc_feature (53)..(54): n is a, c, g, or t
tttttttaagcagtggtatcaacgcagagtacnnacgacttgnnaggttcagnntttttttttttttttttttttttttttttt

SEQ ID NO: 3919 - DNA, 84 bp, Artificial
  Barcode component
  misc_feature (33)..(34): n is a, c, g, or t
  misc_feature (43)..(44): n is a, c, g, or t
  misc_feature (53)..(54): n is a, c, g, or t
tttttttaagcagtggtatcaacgcagagtacnnacgacttgnnctagagcanntttttttttttttttttttttttttttttt

SEQ ID NO: 3920 - DNA, 84 bp, Artificial
  Barcode component
  misc_feature (33)..(34): n is a, c, g, or t
  misc_feature (43)..(44): n is a, c, g, or t
  misc_feature (53)..(54): n is a, c, g, or t
tttttttaagcagtggtatcaacgcagagtacnnacgacttgnncttctagcnntttttttttttttttttttttttttttttt

SEQ ID NO: 3921 - DNA, 84 bp, Artificial
  Barcode component
  misc_feature (33)..(34): n is a, c, g, or t
  misc_feature (43)..(44): n is a, c, g, or t
  misc_feature (53)..(54): n is a, c, g, or t
tttttttaagcagtggtatcaacgcagagtacnnacgacttgnngagtaacgnntttttttttttttttttttttttttttttt

SEQ ID NO: 3922 - DNA, 84 bp, Artificial
  Barcode component
  misc_feature (33)..(34): n is a, c, g, or t
  misc_feature (43)..(44): n is a, c, g, or t
  misc_feature (53)..(54): n is a, c, g, or t
tttttttaagcagtggtatcaacgcagagtacnnacgacttgnnctaagaggnntttttttttttttttttttttttttttttt

SEQ ID NO: 3923 - DNA, 84 bp, Artificial
  Barcode component
  misc_feature (33)..(34): n is a, c, g, or t
  misc_feature (43)..(44): n is a, c, g, or t
  misc_feature (53)..(54): n is a, c, g, or t
tttttttaagcagtggtatcaacgcagagtacnnacgacttgnnacgtgtagnntttttttttttttttttttttttttttttt

SEQ ID NO: 3924 - DNA, 84 bp, Artificial
  Barcode component
  misc_feature (33)..(34): n is a, c, g, or t
  misc_feature (43)..(44): n is a, c, g, or t
  misc_feature (53)..(54): n is a, c, g, or t
tttttttaagcagtggtatcaacgcagagtacnnacgacttgnnactacaggnntttttttttttttttttttttttttttttt

SEQ ID NO: 3925 - DNA, 84 bp, Artificial
  Barcode component
  misc_feature (33)..(34): n is a, c, g, or t
  misc_feature (43)..(44): n is a, c, g, or t
  misc_feature (53)..(54): n is a, c, g, or t
tttttttaagcagtggtatcaacgcagagtacnnacgacttgnntacaggtcnntttttttttttttttttttttttttttttt

SEQ ID NO: 3926 - DNA, 84 bp, Artificial
  Barcode component
  misc_feature (33)..(34): n is a, c, g, or t
  misc_feature (43)..(44): n is a, c, g, or t
  misc_feature (53)..(54): n is a, c, g, or t
tttttttaagcagtggtatcaacgcagagtacnnacgacttgnnctcacatgnntttttttttttttttttttttttttttttt

SEQ ID NO: 3927 - DNA, 84 bp, Artificial
  Barcode component
  misc_feature (33)..(34): n is a, c, g, or t
  misc_feature (43)..(44): n is a, c, g, or t
  misc_feature (53)..(54): n is a, c, g, or t
tttttttaagcagtggtatcaacgcagagtacnnacgacttgnnactaggagnntttttttttttttttttttttttttttttt

SEQ ID NO: 3928 - DNA, 84 bp, Artificial
  Barcode component
  misc_feature (33)..(34): n is a, c, g, or t
  misc_feature (43)..(44): n is a, c, g, or t
  misc_feature (53)..(54): n is a, c, g, or t
tttttttaagcagtggtatcaacgcagagtacnnacgacttgnnccatagganntttttttttttttttttttttttttttttt

SEQ ID NO: 3929 - DNA, 84 bp, Artificial
  Barcode component
  misc_feature (33)..(34): n is a, c, g, or t
  misc_feature (43)..(44): n is a, c, g, or t
  misc_feature (53)..(54): n is a, c, g, or t
tttttttaagcagtggtatcaacgcagagtacnnacgacttgnnggagaatcnntttttttttttttttttttttttttttttt

SEQ ID NO: 3930 - DNA, 84 bp, Artificial
  Barcode component
  misc_feature (33)..(34): n is a, c, g, or t
  misc_feature (43)..(44): n is a, c, g, or t
  misc_feature (53)..(54): n is a, c, g, or t
tttttttaagcagtggtatcaacgcagagtacnnacgacttgnngccaagaanntttttttttttttttttttttttttttttt

SEQ ID NO: 3931 - DNA, 84 bp, Artificial
  Barcode component
  misc_feature (33)..(34): n is a, c, g, or t
  misc_feature (43)..(44): n is a, c, g, or t
  misc_feature (53)..(54): n is a, c, g, or t
tttttttaagcagtggtatcaacgcagagtacnnacgacttgnnaaggcaagnntttttttttttttttttttttttttttttt

SEQ ID NO: 3932 - DNA, 84 bp, Artificial
  Barcode component
  misc_feature (33)..(34): n is a, c, g, or t
  misc_feature (43)..(44): n is a, c, g, or t
  misc_feature (53)..(54): n is a, c, g, or t
tttttttaagcagtggtatcaacgcagagtacnnacgacttgnnaatgtcgcnntttttttttttttttttttttttttttttt

SEQ ID NO: 3933 - DNA, 84 bp, Artificial
  Barcode component
  misc_feature (33)..(34): n is a, c, g, or t
  misc_feature (43)..(44): n is a, c, g, or t
  misc_feature (53)..(54): n is a, c, g, or t
tttttttaagcagtggtatcaacgcagagtacnnacgacttgnnatggaaccnntttttttttttttttttttttttttttttt

SEQ ID NO: 3934 - DNA, 84 bp, Artificial
  Barcode component
  misc_feature (33)..(34): n is a, c, g, or t
  misc_feature (43)..(44): n is a, c, g, or t
  misc_feature (53)..(54): n is a, c, g, or t
tttttttaagcagtggtatcaacgcagagtacnnacgacttgnnagaggcatnntttttttttttttttttttttttttttttt

SEQ ID NO: 3935 - DNA, 84 bp, Artificial
  Barcode component
  misc_feature (33)..(34): n is a, c, g, or t
  misc_feature (43)..(44): n is a, c, g, or t
  misc_feature (53)..(54): n is a, c, g, or t
tttttttaagcagtggtatcaacgcagagtacnnacgacttgnntgcatagcnntttttttttttttttttttttttttttttt

SEQ ID NO: 3936 - DNA, 84 bp, Artificial
  Barcode component
  misc_feature (33)..(34): n is a, c, g, or t
  misc_feature (43)..(44): n is a, c, g, or t
  misc_feature (53)..(54): n is a, c, g, or t
tttttttaagcagtggtatcaacgcagagtacnnacgacttgnnctaacgganntttttttttttttttttttttttttttttt

SEQ ID NO: 3937 - DNA, 84 bp, Artificial
  Barcode component
  misc_feature (33)..(34): n is a, c, g, or t
  misc_feature (43)..(44): n is a, c, g, or t
  misc_feature (53)..(54): n is a, c, g, or t
tttttttaagcagtggtatcaacgcagagtacnnacgacttgnntatcgaggnntttttttttttttttttttttttttttttt

SEQ ID NO: 3938 - DNA, 84 bp, Artificial
  Barcode component
  misc_feature (33)..(34): n is a, c, g, or t
  misc_feature (43)..(44): n is a, c, g, or t
  misc_feature (53)..(54): n is a, c, g, or t
tttttttaagcagtggtatcaacgcagagtacnnacgacttgnncatagcctnntttttttttttttttttttttttttttttt

SEQ ID NO: 3939 - DNA, 84 bp, Artificial
  Barcode component
  misc_feature (33)..(34): n is a, c, g, or t
  misc_feature (43)..(44): n is a, c, g, or t
  misc_feature (53)..(54): n is a, c, g, or t
tttttttaagcagtggtatcaacgcagagtacnnacgacttgnnatcgagacnntttttttttttttttttttttttttttttt

SEQ ID NO: 3940 - DNA, 84 bp, Artificial
  Barcode component
  misc_feature (33)..(34): n is a, c, g, or t
  misc_feature (43)..(44): n is a, c, g, or t
  misc_feature (53)..(54): n is a, c, g, or t
tttttttaagcagtggtatcaacgcagagtacnnacgacttgnnggaagagtnntttttttttttttttttttttttttttttt

SEQ ID NO: 3941 - DNA, 84 bp, Artificial
  Barcode component
  misc_feature (33)..(34): n is a, c, g, or t
  misc_feature (43)..(44): n is a, c, g, or t
  misc_feature (53)..(54): n is a, c, g, or t
tttttttaagcagtggtatcaacgcagagtacnnacgacttgnnccaagtagnntttttttttttttttttttttttttttttt

SEQ ID NO: 3942 - DNA, 84 bp, Artificial
  Barcode component
  misc_feature (33)..(34): n is a, c, g, or t
  misc_feature (43)..(44): n is a, c, g, or t
  misc_feature (53)..(54): n is a, c, g, or t
tttttttaagcagtggtatcaacgcagagtacnnacgacttgnnctgaacagnntttttttttttttttttttttttttttttt

SEQ ID NO: 3943 - DNA, 84 bp, Artificial
  Barcode component
  misc_feature (33)..(34): n is a, c, g, or t
  misc_feature (43)..(44): n is a, c, g, or t
  misc_feature (53)..(54): n is a, c, g, or t
tttttttaagcagtggtatcaacgcagagtacnnacgacttgnngtaggttcnntttttttttttttttttttttttttttttt

SEQ ID NO: 3944 - DNA, 84 bp, Artificial
  Barcode component
  misc_feature (33)..(34): n is a, c, g, or t
  misc_feature (43)..(44): n is a, c, g, or t
  misc_feature (53)..(54): n is a, c, g, or t
tttttttaagcagtggtatcaacgcagagtacnnacgacttgnngtatggacnntttttttttttttttttttttttttttttt

SEQ ID NO: 3945 - DNA, 84 bp, Artificial
  Barcode component
  misc_feature (33)..(34): n is a, c, g, or t
  misc_feature (43)..(44): n is a, c, g, or t
  misc_feature (53)..(54): n is a, c, g, or t
tttttttaagcagtggtatcaacgcagagtacnnacgacttgnntcgcaacanntttttttttttttttttttttttttttttt

SEQ ID NO: 3946 - DNA, 84 bp, Artificial
  Barcode component
  misc_feature (33)..(34): n is a, c, g, or t
  misc_feature (43)..(44): n is a, c, g, or t
  misc_feature (53)..(54): n is a, c, g, or t
tttttttaagcagtggtatcaacgcagagtacnnacgacttgnnccgctaatnntttttttttttttttttttttttttttttt

SEQ ID NO: 3947 - DNA, 84 bp, Artificial
  Barcode component
  misc_feature (33)..(34): n is a, c, g, or t
  misc_feature (43)..(44): n is a, c, g, or t
  misc_feature (53)..(54): n is a, c, g, or t
tttttttaagcagtggtatcaacgcagagtacnnacgacttgnngattcgcanntttttttttttttttttttttttttttttt

SEQ ID NO: 3948 - DNA, 84 bp, Artificial
  Barcode component
  misc_feature (33)..(34): n is a, c, g, or t
  misc_feature (43)..(44): n is a, c, g, or t
  misc_feature (53)..(54): n is a, c, g, or t
tttttttaagcagtggtatcaacgcagagtacnnacgacttgnncgatggaanntttttttttttttttttttttttttttttt

SEQ ID NO: 3949 - DNA, 84 bp, Artificial
  Barcode component
  misc_feature (33)..(34): n is a, c, g, or t
  misc_feature (43)..(44): n is a, c, g, or t
  misc_feature (53)..(54): n is a, c, g, or t
tttttttaagcagtggtatcaacgcagagtacnnacgacttgnnagcaagganntttttttttttttttttttttttttttttt

SEQ ID NO: 3950 - DNA, 84 bp, Artificial
  Barcode component
  misc_feature (33)..(34): n is a, c, g, or t
  misc_feature (43)..(44): n is a, c, g, or t
  misc_feature (53)..(54): n is a, c, g, or t
tttttttaagcagtggtatcaacgcagagtacnnacgacttgnncgtagcaanntttttttttttttttttttttttttttttt

SEQ ID NO: 3951 - DNA, 84 bp, Artificial
  Barcode component
  misc_feature (33)..(34): n is a, c, g, or t
  misc_feature (43)..(44): n is a, c, g, or t
  misc_feature (53)..(54): n is a, c, g, or t
tttttttaagcagtggtatcaacgcagagtacnnacgacttgnntggcagtanntttttttttttttttttttttttttttttt

SEQ ID NO: 3952 - DNA, 84 bp, Artificial
  Barcode component
  misc_feature (33)..(34): n is a, c, g, or t
  misc_feature (43)..(44): n is a, c, g, or t
  misc_feature (53)..(54): n is a, c, g, or t
tttttttaagcagtggtatcaacgcagagtacnnacgacttgnncggtagttnntttttttttttttttttttttttttttttt

SEQ ID NO: 3953 - DNA, 84 bp, Artificial
  Barcode component
  misc_feature (33)..(34): n is a, c, g, or t
  misc_feature (43)..(44): n is a, c, g, or t
  misc_feature (53)..(54): n is a, c, g, or t
tttttttaagcagtggtatcaacgcagagtacnnacgacttgnntgacttcgnntttttttttttttttttttttttttttttt

SEQ ID NO: 3954 - DNA, 84 bp, Artificial
  Barcode component
  misc_feature (33)..(34): n is a, c, g, or t
  misc_feature (43)..(44): n is a, c, g, or t
  misc_feature (53)..(54): n is a, c, g, or t
tttttttaagcagtggtatcaacgcagagtacnnacgacttgnngagtgcaanntttttttttttttttttttttttttttttt

SEQ ID NO: 3955 - DNA, 84 bp, Artificial
  Barcode component
  misc_feature (33)..(34): n is a, c, g, or t
  misc_feature (43)..(44): n is a, c, g, or t
  misc_feature (53)..(54): n is a, c, g, or t
tttttttaagcagtggtatcaacgcagagtacnnacgacttgnnacggtaacnntttttttttttttttttttttttttttttt

SEQ ID NO: 3956 - DNA, 84 bp, Artificial
  Barcode component
  misc_feature (33)..(34): n is a, c, g, or t
  misc_feature (43)..(44): n is a, c, g, or t
  misc_feature (53)..(54): n is a, c, g, or t
tttttttaagcagtggtatcaacgcagagtacnnacgacttgnnaagtggtgnntttttttttttttttttttttttttttttt

SEQ ID NO: 3957 - DNA, 84 bp, Artificial
  Barcode component
  misc_feature (33)..(34): n is a, c, g, or t
  misc_feature (43)..(44): n is a, c, g, or t
  misc_feature (53)..(54): n is a, c, g, or t
tttttttaagcagtggtatcaacgcagagtacnnacgacttgnnggagacaanntttttttttttttttttttttttttttttt

SEQ ID NO: 3958 - DNA, 84 bp, Artificial
  Barcode component
  misc_feature (33)..(34): n is a, c, g, or t
  misc_feature (43)..(44): n is a, c, g, or t
  misc_feature (53)..(54): n is a, c, g, or t
tttttttaagcagtggtatcaacgcagagtacnnacgacttgnntcaaggacnntttttttttttttttttttttttttttttt

SEQ ID NO: 3959 - DNA, 84 bp, Artificial
  Barcode component
  misc_feature (33)..(34): n is a, c, g, or t
  misc_feature (43)..(44): n is a, c, g, or t
  misc_feature (53)..(54): n is a, c, g, or t
tttttttaagcagtggtatcaacgcagagtacnnacgacttgnnaagagagcnntttttttttttttttttttttttttttttt

SEQ ID NO: 3960 - DNA, 84 bp, Artificial
  Barcode component
  misc_feature (33)..(34): n is a, c, g, or t
  misc_feature (43)..(44): n is a, c, g, or t
  misc_feature (53)..(54): n is a, c, g, or t
tttttttaagcagtggtatcaacgcagagtacnnacgacttgnncgagagatnntttttttttttttttttttttttttttttt

SEQ ID NO: 3961 - DNA, 84 bp, Artificial
  Barcode component
  misc_feature (33)..(34): n is a, c, g, or t
  misc_feature (43)..(44): n is a, c, g, or t
  misc_feature (53)..(54): n is a, c, g, or t
tttttttaagcagtggtatcaacgcagagtacnnacgacttgnnacagatggnntttttttttttttttttttttttttttttt

SEQ ID NO: 3962 - DNA, 84 bp, Artificial
  Barcode component
  misc_feature (33)..(34): n is a, c, g, or t
  misc_feature (43)..(44): n is a, c, g, or t
  misc_feature (53)..(54): n is a, c, g, or t
tttttttaagcagtggtatcaacgcagagtacnnacgacttgnnaggagtcanntttttttttttttttttttttttttttttt

SEQ ID NO: 3963 - DNA, 84 bp, Artificial
  Barcode component
  misc_feature (33)..(34): n is a, c, g, or t
  misc_feature (43)..(44): n is a, c, g, or t
  misc_feature (53)..(54): n is a, c, g, or t
tttttttaagcagtggtatcaacgcagagtacnnacgacttgnncgtgttacnntttttttttttttttttttttttttttttt

SEQ ID NO: 3964 - DNA, 84 bp, Artificial
  Barcode component
  misc_feature (33)..(34): n is a, c, g, or t
  misc_feature (43)..(44): n is a, c, g, or t
  misc_feature (53)..(54): n is a, c, g, or t
tttttttaagcagtggtatcaacgcagagtacnnacgacttgnntagtgtgcnntttttttttttttttttttttttttttttt

SEQ ID NO: 3965 - DNA, 84 bp, Artificial
  Barcode component
  misc_feature (33)..(34): n is a, c, g, or t
  misc_feature (43)..(44): n is a, c, g, or t
  misc_feature (53)..(54): n is a, c, g, or t
tttttttaagcagtggtatcaacgcagagtacnnacgacttgnnctcatgacnntttttttttttttttttttttttttttttt

SEQ ID NO: 3966 - DNA, 84 bp, Artificial
  Barcode component
  misc_feature (33)..(34): n is a, c, g, or t
  misc_feature (43)..(44): n is a, c, g, or t
  misc_feature (53)..(54): n is a, c, g, or t
tttttttaagcagtggtatcaacgcagagtacnnacgacttgnngtatccagnntttttttttttttttttttttttttttttt

SEQ ID NO: 3967 - DNA, 84 bp, Artificial
  Barcode component
  misc_feature (33)..(34): n is a, c, g, or t
  misc_feature (43)..(44): n is a, c, g, or t
  misc_feature (53)..(54): n is a, c, g, or t
tttttttaagcagtggtatcaacgcagagtacnnacgacttgnnacgcctatnntttttttttttttttttttttttttttttt

SEQ ID NO: 3968 - DNA, 84 bp, Artificial
  Barcode component
  misc_feature (33)..(34): n is a, c, g, or t
  misc_feature (43)..(44): n is a, c, g, or t
  misc_feature (53)..(54): n is a, c, g, or t
tttttttaagcagtggtatcaacgcagagtacnnacgacttgnnaacgacctnntttttttttttttttttttttttttttttt

SEQ ID NO: 3969 - DNA, 84 bp, Artificial
  Barcode component
  misc_feature (33)..(34): n is a, c, g, or t
  misc_feature (43)..(44): n is a, c, g, or t
  misc_feature (53)..(54): n is a, c, g, or t
tttttttaagcagtggtatcaacgcagagtacnnacgacttgnnatcaggctnntttttttttttttttttttttttttttttt

SEQ ID NO: 3970 - DNA, 84 bp, Artificial
  Barcode component
  misc_feature (33)..(34): n is a, c, g, or t
  misc_feature (43)..(44): n is a, c, g, or t
  misc_feature (53)..(54): n is a, c, g, or t
tttttttaagcagtggtatcaacgcagagtacnnacgacttgnncaagttcgnntttttttttttttttttttttttttttttt

SEQ ID NO: 3971 - DNA, 84 bp, Artificial
  Barcode component
  misc_feature (33)..(34): n is a, c, g, or t
  misc_feature (43)..(44): n is a, c, g, or t
  misc_feature (53)..(54): n is a, c, g, or t
tttttttaagcagtggtatcaacgcagagtacnnacgacttgnntagccaganntttttttttttttttttttttttttttttt

SEQ ID NO: 3972 - DNA, 84 bp, Artificial
  Barcode component
  misc_feature (33)..(34): n is a, c, g, or t
  misc_feature (43)..(44): n is a, c, g, or t
  misc_feature (53)..(54): n is a, c, g, or t
tttttttaagcagtggtatcaacgcagagtacnnacgacttgnncaatcacgnntttttttttttttttttttttttttttttt

SEQ ID NO: 3973 - DNA, 84 bp, Artificial
  Barcode component
  misc_feature (33)..(34): n is a, c, g, or t
  misc_feature (43)..(44): n is a, c, g, or t
  misc_feature (53)..(54): n is a, c, g, or t
tttttttaagcagtggtatcaacgcagagtacnnacgacttgnngcaacaagnntttttttttttttttttttttttttttttt

SEQ ID NO: 3974 - DNA, 84 bp, Artificial
  Barcode component
  misc_feature (33)..(34): n is a, c, g, or t
  misc_feature (43)..(44): n is a, c, g, or t
  misc_feature (53)..(54): n is a, c, g, or t
tttttttaagcagtggtatcaacgcagagtacnnacgacttgnncacgacaanntttttttttttttttttttttttttttttt

SEQ ID NO: 3975 - DNA, 84 bp, Artificial
  Barcode component
  misc_feature (33)..(34): n is a, c, g, or t
  misc_feature (43)..(44): n is a, c, g, or t
  misc_feature (53)..(54): n is a, c, g, or t
tttttttaagcagtggtatcaacgcagagtacnnacgacttgnntacggaganntttttttttttttttttttttttttttttt

SEQ ID NO: 3976 - DNA, 84 bp, Artificial
  Barcode component
  misc_feature (33)..(34): n is a, c, g, or t
  misc_feature (43)..(44): n is a, c, g, or t
  misc_feature (53)..(54): n is a, c, g, or t
tttttttaagcagtggtatcaacgcagagtacnnacgacttgnncgacaaganntttttttttttttttttttttttttttttt

SEQ ID NO: 3977 - DNA, 84 bp, Artificial
  Barcode component
  misc_feature (33)..(34): n is a, c, g, or t
  misc_feature (43)..(44): n is a, c, g, or t
  misc_feature (53)..(54): n is a, c, g, or t
tttttttaagcagtggtatcaacgcagagtacnnacgacttgnncgaagtganntttttttttttttttttttttttttttttt

SEQ ID NO: 3978 - DNA, 84 bp, Artificial
  Barcode component
  misc_feature (33)..(34): n is a, c, g, or t
  misc_feature (43)..(44): n is a, c, g, or t
  misc_feature (53)..(54): n is a, c, g, or t
tttttttaagcagtggtatcaacgcagagtacnnacgacttgnnagctggtanntttttttttttttttttttttttttttttt

SEQ ID NO: 3979 - DNA, 84 bp, Artificial
  Barcode component
  misc_feature (33)..(34): n is a, c, g, or t
  misc_feature (43)..(44): n is a, c, g, or t
  misc_feature (53)..(54): n is a, c, g, or t
tttttttaagcagtggtatcaacgcagagtacnnacgacttgnnaactaggcnntttttttttttttttttttttttttttttt

SEQ ID NO: 3980 - DNA, 84 bp, Artificial
  Barcode component
  misc_feature (33)..(34): n is a, c, g, or t
  misc_feature (43)..(44): n is a, c, g, or t
  misc_feature (53)..(54): n is a, c, g, or t
tttttttaagcagtggtatcaacgcagagtacnnacgacttgnncagcaagtnntttttttttttttttttttttttttttttt

SEQ ID NO: 3981 - DNA, 84 bp, Artificial
  Barcode component
  misc_feature (33)..(34): n is a, c, g, or t
  misc_feature (43)..(44): n is a, c, g, or t
  misc_feature (53)..(54): n is a, c, g, or t
tttttttaagcagtggtatcaacgcagagtacnnacgacttgnnacgaggtanntttttttttttttttttttttttttttttt

SEQ ID NO: 3982 - DNA, 84 bp, Artificial
  Barcode component
  misc_feature (33)..(34): n is a, c, g, or t
  misc_feature (43)..(44): n is a, c, g, or t
  misc_feature (53)..(54): n is a, c, g, or t
tttttttaagcagtggtatcaacgcagagtacnnacgacttgnncatcttccnntttttttttttttttttttttttttttttt

SEQ ID NO: 3983 - DNA, 84 bp, Artificial
  Barcode component
  misc_feature (33)..(34): n is a, c, g, or t
  misc_feature (43)..(44): n is a, c, g, or t
  misc_feature (53)..(54): n is a, c, g, or t
tttttttaagcagtggtatcaacgcagagtacnnacgacttgnncctgaatcnntttttttttttttttttttttttttttttt

SEQ ID NO: 3984 - DNA, 84 bp, Artificial
  Barcode component
  misc_feature (33)..(34): n is a, c, g, or t
  misc_feature (43)..(44): n is a, c, g, or t
  misc_feature (53)..(54): n is a, c, g, or t
tttttttaagcagtggtatcaacgcagagtacnnacgacttgnntgcagactnntttttttttttttttttttttttttttttt

SEQ ID NO: 3985 - DNA, 84 bp, Artificial
  Barcode component
  misc_feature (33)..(34): n is a, c, g, or t
  misc_feature (43)..(44): n is a, c, g, or t
  misc_feature (53)..(54): n is a, c, g, or t
tttttttaagcagtggtatcaacgcagagtacnnacgacttgnnagatgtggnntttttttttttttttttttttttttttttt

SEQ ID NO: 3986 - DNA, 84 bp, Artificial
  Barcode component
  misc_feature (33)..(34): n is a, c, g, or t
  misc_feature (43)..(44): n is a, c, g, or t
  misc_feature (53)..(54): n is a, c, g, or t
tttttttaagcagtggtatcaacgcagagtacnnacgacttgnnagttcgacnntttttttttttttttttttttttttttttt

SEQ ID NO: 3987 - DNA, 84 bp, Artificial
  Barcode component
  misc_feature (33)..(34): n is a, c, g, or t
  misc_feature (43)..(44): n is a, c, g, or t
  misc_feature (53)..(54): n is a, c, g, or t
tttttttaagcagtggtatcaacgcagagtacnnacgacttgnnacaacctcnntttttttttttttttttttttttttttttt

SEQ ID NO: 3988 - DNA, 84 bp, Artificial
  Barcode component
  misc_feature (33)..(34): n is a, c, g, or t
  misc_feature (43)..(44): n is a, c, g, or t
  misc_feature (53)..(54): n is a, c, g, or t
tttttttaagcagtggtatcaacgcagagtacnnacgacttgnncatggtagnntttttttttttttttttttttttttttttt

SEQ ID NO: 3989 - DNA, 84 bp, Artificial
  Barcode component
  misc_feature (33)..(34): n is a, c, g, or t
  misc_feature (43)..(44): n is a, c, g, or t
  misc_feature (53)..(54): n is a, c, g, or t
tttttttaagcagtggtatcaacgcagagtacnnacgacttgnncgtatctcnntttttttttttttttttttttttttttttt

SEQ ID NO: 3990 - DNA, 84 bp, Artificial
  Barcode component
  misc_feature (33)..(34): n is a, c, g, or t
  misc_feature (43)..(44): n is a, c, g, or t
  misc_feature (53)..(54): n is a, c, g, or t
tttttttaagcagtggtatcaacgcagagtacnnacgacttgnncctagttcnntttttttttttttttttttttttttttttt

SEQ ID NO: 3991 - DNA, 84 bp, Artificial
  Barcode component
  misc_feature (33)..(34): n is a, c, g, or t
  misc_feature (43)..(44): n is a, c, g, or t
  misc_feature (53)..(54): n is a, c, g, or t
tttttttaagcagtggtatcaacgcagagtacnnacgacttgnncaagagtcnntttttttttttttttttttttttttttttt

SEQ ID NO: 3992 - DNA, 84 bp, Artificial
  Barcode component
  misc_feature (33)..(34): n is a, c, g, or t
  misc_feature (43)..(44): n is a, c, g, or t
  misc_feature (53)..(54): n is a, c, g, or t
tttttttaagcagtggtatcaacgcagagtacnngttcgagannaatcggcanntttttttttttttttttttttttttttttt

SEQ ID NO: 3993 - DNA, 84 bp, Artificial
  Barcode component
  misc_feature (33)..(34): n is a, c, g, or t
  misc_feature (43)..(44): n is a, c, g, or t
  misc_feature (53)..(54): n is a, c, g, or t
tttttttaagcagtggtatcaacgcagagtacnngttcgaganntacggcatnntttttttttttttttttttttttttttttt

SEQ ID NO: 3994 - DNA, 84 bp, Artificial
  Barcode component
  misc_feature (33)..(34): n is a, c, g, or t
  misc_feature (43)..(44): n is a, c, g, or t
  misc_feature (53)..(54): n is a, c, g, or t
tttttttaagcagtggtatcaacgcagagtacnngttcgagannttggatcgnntttttttttttttttttttttttttttttt

SEQ ID NO: 3995 - DNA, 84 bp, Artificial
  Barcode component
  misc_feature (33)..(34): n is a, c, g, or t
  misc_feature (43)..(44): n is a, c, g, or t
  misc_feature (53)..(54): n is a, c, g, or t
tttttttaagcagtggtatcaacgcagagtacnngttcgaganntggaacganntttttttttttttttttttttttttttttt

SEQ ID NO: 3996 - DNA, 84 bp, Artificial
  Barcode component
  misc_feature (33)..(34): n is a, c, g, or t
  misc_feature (43)..(44): n is a, c, g, or t
  misc_feature (53)..(54): n is a, c, g, or t
tttttttaagcagtggtatcaacgcagagtacnngttcgagannggcaatcanntttttttttttttttttttttttttttttt

SEQ ID NO: 3997 - DNA, 84 bp, Artificial
  Barcode component
  misc_feature (33)..(34): n is a, c, g, or t
  misc_feature (43)..(44): n is a, c, g, or t
  misc_feature (53)..(54): n is a, c, g, or t
tttttttaagcagtggtatcaacgcagagtacnngttcgaganngaatccganntttttttttttttttttttttttttttttt

SEQ ID NO: 3998 - DNA, 84 bp, Artificial
  Barcode component
  misc_feature (33)..(34): n is a, c, g, or t
  misc_feature (43)..(44): n is a, c, g, or t
  misc_feature (53)..(54): n is a, c, g, or t
tttttttaagcagtggtatcaacgcagagtacnngttcgagannttacggtgnntttttttttttttttttttttttttttttt

SEQ ID NO: 3999 - DNA, 84 bp, Artificial
  Barcode component
  misc_feature (33)..(34): n is a, c, g, or t
  misc_feature (43)..(44): n is a, c, g, or t
  misc_feature (53)..(54): n is a, c, g, or t
tttttttaagcagtggtatcaacgcagagtacnngttcgaganncatatcggnntttttttttttttttttttttttttttttt

SEQ ID NO: 4000 - DNA, 84 bp, Artificial
  Barcode component
  misc_feature (33)..(34): n is a, c, g, or t
  misc_feature (43)..(44): n is a, c, g, or t
  misc_feature (53)..(54): n is a, c, g, or t
tttttttaagcagtggtatcaacgcagagtacnngttcgaganncttcggtanntttttttttttttttttttttttttttttt

SEQ ID NO: 4001 - DNA, 84 bp, Artificial
  Barcode component
  misc_feature (33)..(34): n is a, c, g, or t
  misc_feature (43)..(44): n is a, c, g, or t
  misc_feature (53)..(54): n is a, c, g, or t
tttttttaagcagtggtatcaacgcagagtacnngttcgaganntcctaacgnntttttttttttttttttttttttttttttt

SEQ ID NO: 4002 - DNA, 84 bp, Artificial
  Barcode component
  misc_feature (33)..(34): n is a, c, g, or t
  misc_feature (43)..(44): n is a, c, g, or t
  misc_feature (53)..(54): n is a, c, g, or t
tttttttaagcagtggtatcaacgcagagtacnngttcgaganngtaagccanntttttttttttttttttttttttttttttt

SEQ ID NO: 4003 - DNA, 84 bp, Artificial
  Barcode component
  misc_feature (33)..(34): n is a, c, g, or t
  misc_feature (43)..(44): n is a, c, g, or t
  misc_feature (53)..(54): n is a, c, g, or t
tttttttaagcagtggtatcaacgcagagtacnngttcgaganntaaggtggnntttttttttttttttttttttttttttttt

SEQ ID NO: 4004 - DNA, 84 bp, Artificial
  Barcode component
  misc_feature (33)..(34): n is a, c, g, or t
  misc_feature (43)..(44): n is a, c, g, or t
  misc_feature (53)..(54): n is a, c, g, or t
tttttttaagcagtggtatcaacgcagagtacnngttcgagannggtaagctnntttttttttttttttttttttttttttttt

SEQ ID NO: 4005 - DNA, 84 bp, Artificial
  Barcode component
  misc_feature (33)..(34): n is a, c, g, or t
  misc_feature (43)..(44): n is a, c, g, or t
  misc_feature (53)..(54): n is a, c, g, or t
tttttttaagcagtggtatcaacgcagagtacnngttcgaganntgtgtcganntttttttttttttttttttttttttttttt

SEQ ID NO: 4006 - DNA, 84 bp, Artificial
  Barcode component
  misc_feature (33)..(34): n is a, c, g, or t
  misc_feature (43)..(44): n is a, c, g, or t
  misc_feature (53)..(54): n is a, c, g, or t
tttttttaagcagtggtatcaacgcagagtacnngttcgaganngagcatganntttttttttttttttttttttttttttttt

SEQ ID NO: 4007 - DNA, 84 bp, Artificial
  Barcode component
  misc_feature (33)..(34): n is a, c, g, or t
  misc_feature (43)..(44): n is a, c, g, or t
  misc_feature (53)..(54): n is a, c, g, or t
tttttttaagcagtggtatcaacgcagagtacnngttcgaganntcgaagtcnntttttttttttttttttttttttttttttt

SEQ ID NO: 4008 - DNA, 84 bp, Artificial
  Barcode component
  misc_feature (33)..(34): n is a, c, g, or t
  misc_feature (43)..(44): n is a, c, g, or t
  misc_feature (53)..(54): n is a, c, g, or t
tttttttaagcagtggtatcaacgcagagtacnngttcgagannggtgaacanntttttttttttttttttttttttttttttt

SEQ ID NO: 4009 - DNA, 84 bp, Artificial
  Barcode component
  misc_feature (33)..(34): n is a, c, g, or t
  misc_feature (43)..(44): n is a, c, g, or t
  misc_feature (53)..(54): n is a, c, g, or t
tttttttaagcagtggtatcaacgcagagtacnngttcgagannacatgcacnntttttttttttttttttttttttttttttt

SEQ ID NO: 4010 - DNA, 84 bp, Artificial
  Barcode component
  misc_feature (33)..(34): n is a, c, g, or t
  misc_feature (43)..(44): n is a, c, g, or t
  misc_feature (53)..(54): n is a, c, g, or t
tttttttaagcagtggtatcaacgcagagtacnngttcgagannccaacagtnntttttttttttttttttttttttttttttt

SEQ ID NO: 4011 - DNA, 84 bp, Artificial
  Barcode component
  misc_feature (33)..(34): n is a, c, g, or t
  misc_feature (43)..(44): n is a, c, g, or t
  misc_feature (53)..(54): n is a, c, g, or t
tttttttaagcagtggtatcaacgcagagtacnngttcgagannagaacagcnntttttttttttttttttttttttttttttt

SEQ ID NO: 4012 - DNA, 84 bp, Artificial
  Barcode component
  misc_feature (33)..(34): n is a, c, g, or t
  misc_feature (43)..(44): n is a, c, g, or t
  misc_feature (53)..(54): n is a, c, g, or t
tttttttaagcagtggtatcaacgcagagtacnngttcgaganngaacacgtnntttttttttttttttttttttttttttttt

SEQ ID NO: 4013 - DNA, 84 bp, Artificial
  Barcode component
  misc_feature (33)..(34): n is a, c, g, or t
  misc_feature (43)..(44): n is a, c, g, or t
  misc_feature (53)..(54): n is a, c, g, or t
tttttttaagcagtggtatcaacgcagagtacnngttcgagannggtcttcanntttttttttttttttttttttttttttttt

SEQ ID NO: 4014 - DNA, 84 bp, Artificial
  Barcode component
  misc_feature (33)..(34): n is a, c, g, or t
  misc_feature (43)..(44): n is a, c, g, or t
  misc_feature (53)..(54): n is a, c, g, or t
tttttttaagcagtggtatcaacgcagagtacnngttcgagannaggttcagnntttttttttttttttttttttttttttttt

SEQ ID NO: 4015 - DNA, 84 bp, Artificial
  Barcode component
  misc_feature (33)..(34): n is a, c, g, or t
  misc_feature (43)..(44): n is a, c, g, or t
  misc_feature (53)..(54): n is a, c, g, or t
tttttttaagcagtggtatcaacgcagagtacnngttcgagannctagagcanntttttttttttttttttttttttttttttt

SEQ ID NO: 4016 - DNA, 84 bp, Artificial
  Barcode component
  misc_feature (33)..(34): n is a, c, g, or t
  misc_feature (43)..(44): n is a, c, g, or t
  misc_feature (53)..(54): n is a, c, g, or t
tttttttaagcagtggtatcaacgcagagtacnngttcgaganncttctagcnntttttttttttttttttttttttttttttt

SEQ ID NO: 4017 - DNA, 84 bp, Artificial
  Barcode component
  misc_feature (33)..(34): n is a, c, g, or t
  misc_feature (43)..(44): n is a, c, g, or t
  misc_feature (53)..(54): n is a, c, g, or t
tttttttaagcagtggtatcaacgcagagtacnngttcgaganngagtaacgnntttttttttttttttttttttttttttttt

SEQ ID NO: 4018 - DNA, 84 bp, Artificial
  Barcode component
  misc_feature (33)..(34): n is a, c, g, or t
  misc_feature (43)..(44): n is a, c, g, or t
  misc_feature (53)..(54): n is a, c, g, or t
tttttttaagcagtggtatcaacgcagagtacnngttcgagannctaagaggnntttttttttttttttttttttttttttttt

SEQ ID NO: 4019 - DNA, 84 bp, Artificial
  Barcode component
  misc_feature (33)..(34): n is a, c, g, or t
  misc_feature (43)..(44): n is a, c, g, or t
  misc_feature (53)..(54): n is a, c, g, or t
tttttttaagcagtggtatcaacgcagagtacnngttcgagannacgtgtagnntttttttttttttttttttttttttttttt

SEQ ID NO: 4020 - DNA, 84 bp, Artificial
  Barcode component
  misc_feature (33)..(34): n is a, c, g, or t
  misc_feature (43)..(44): n is a, c, g, or t
  misc_feature (53)..(54): n is a, c, g, or t
tttttttaagcagtggtatcaacgcagagtacnngttcgagannactacaggnntttttttttttttttttttttttttttttt

SEQ ID NO: 4021 - DNA, 84 bp, Artificial
  Barcode component
  misc_feature (33)..(34): n is a, c, g, or t
  misc_feature (43)..(44): n is a, c, g, or t
  misc_feature (53)..(54): n is a, c, g, or t
tttttttaagcagtggtatcaacgcagagtacnngttcgaganntacaggtcnntttttttttttttttttttttttttttttt

SEQ ID NO: 4022 - DNA, 84 bp, Artificial
  Barcode component
  misc_feature (33)..(34): n is a, c, g, or t
  misc_feature (43)..(44): n is a, c, g, or t
  misc_feature (53)..(54): n is a, c, g, or t
tttttttaagcagtggtatcaacgcagagtacnngttcgagannctcacatgnntttttttttttttttttttttttttttttt

SEQ ID NO: 4023 - DNA, 84 bp, Artificial
  Barcode component
  misc_feature (33)..(34): n is a, c, g, or t
  misc_feature (43)..(44): n is a, c, g, or t
  misc_feature (53)..(54): n is a, c, g, or t
tttttttaagcagtggtatcaacgcagagtacnngttcgagannactaggagnntttttttttttttttttttttttttttttt

SEQ ID NO: 4024 - DNA, 84 bp, Artificial
  Barcode component
  misc_feature (33)..(34): n is a, c, g, or t
  misc_feature (43)..(44): n is a, c, g, or t
  misc_feature (53)..(54): n is a, c, g, or t
tttttttaagcagtggtatcaacgcagagtacnngttcgagannccatagganntttttttttttttttttttttttttttttt

SEQ ID NO: 4025 - DNA, 84 bp, Artificial
  Barcode component
  misc_feature (33)..(34): n is a, c, g, or t
  misc_feature (43)..(44): n is a, c, g, or t
  misc_feature (53)..(54): n is a, c, g, or t
tttttttaagcagtggtatcaacgcagagtacnngttcgagannggagaatcnntttttttttttttttttttttttttttttt

SEQ ID NO: 4026 - DNA, 84 bp, Artificial
  Barcode component
  misc_feature (33)..(34): n is a, c, g, or t
  misc_feature (43)..(44): n is a, c, g, or t
  misc_feature (53)..(54): n is a, c, g, or t
tttttttaagcagtggtatcaacgcagagtacnngttcgaganngccaagaanntttttttttttttttttttttttttttttt

SEQ ID NO: 4027 - DNA, 84 bp, Artificial
  Barcode component
  misc_feature (33)..(34): n is a, c, g, or t
  misc_feature (43)..(44): n is a, c, g, or t
  misc_feature (53)..(54): n is a, c, g, or t
tttttttaagcagtggtatcaacgcagagtacnngttcgagannaaggcaagnntttttttttttttttttttttttttttttt

SEQ ID NO: 4028 - DNA, 84 bp, Artificial
  Barcode component
  misc_feature (33)..(34): n is a, c, g, or t
  misc_feature (43)..(44): n is a, c, g, or t
  misc_feature (53)..(54): n is a, c, g, or t
tttttttaagcagtggtatcaacgcagagtacnngttcgagannaatgtcgcnntttttttttttttttttttttttttttttt

SEQ ID NO: 4029 - DNA, 84 bp, Artificial
  Barcode component
  misc_feature (33)..(34): n is a, c, g, or t
  misc_feature (43)..(44): n is a, c, g, or t
  misc_feature (53)..(54): n is a, c, g, or t
tttttttaagcagtggtatcaacgcagagtacnngttcgagannatggaaccnntttttttttttttttttttttttttttttt

SEQ ID NO: 4030 - DNA, 84 bp, Artificial
  Barcode component
  misc_feature (33)..(34): n is a, c, g, or t
  misc_feature (43)..(44): n is a, c, g, or t
  misc_feature (53)..(54): n is a, c, g, or t
tttttttaagcagtggtatcaacgcagagtacnngttcgagannagaggcatnntttttttttttttttttttttttttttttt

SEQ ID NO: 4031 - DNA, 84 bp, Artificial
  Barcode component
  misc_feature (33)..(34): n is a, c, g, or t
  misc_feature (43)..(44): n is a, c, g, or t
  misc_feature (53)..(54): n is a, c, g, or t
tttttttaagcagtggtatcaacgcagagtacnngttcgaganntgcatagcnntttttttttttttttttttttttttttttt

SEQ ID NO: 4032 - DNA, 84 bp, Artificial
  Barcode component
  misc_feature (33)..(34): n is a, c, g, or t
  misc_feature (43)..(44): n is a, c, g, or t
  misc_feature (53)..(54): n is a, c, g, or t
tttttttaagcagtggtatcaacgcagagtacnngttcgagannctaacgganntttttttttttttttttttttttttttttt

SEQ ID NO: 4033 - DNA, 84 bp, Artificial
  Barcode component
  misc_feature (33)..(34): n is a, c, g, or t
  misc_feature (43)..(44): n is a, c, g, or t
  misc_feature (53)..(54): n is a, c, g, or t
tttttttaagcagtggtatcaacgcagagtacnngttcgaganntatcgaggnntttttttttttttttttttttttttttttt

SEQ ID NO: 4034 - DNA, 84 bp, Artificial
  Barcode component
  misc_feature (33)..(34): n is a, c, g, or t
  misc_feature (43)..(44): n is a, c, g, or t
  misc_feature (53)..(54): n is a, c, g, or t
tttttttaagcagtggtatcaacgcagagtacnngttcgaganncatagcctnntttttttttttttttttttttttttttttt

SEQ ID NO: 4035 - DNA, 84 bp, Artificial
  Barcode component
  misc_feature (33)..(34): n is a, c, g, or t
  misc_feature (43)..(44): n is a, c, g, or t
  misc_feature (53)..(54): n is a, c, g, or t
tttttttaagcagtggtatcaacgcagagtacnngttcgagannatcgagacnntttttttttttttttttttttttttttttt

SEQ ID NO: 4036 - DNA, 84 bp, Artificial
  Barcode component
  misc_feature (33)..(34): n is a, c, g, or t
  misc_feature (43)..(44): n is a, c, g, or t
  misc_feature (53)..(54): n is a, c, g, or t
tttttttaagcagtggtatcaacgcagagtacnngttcgagannggaagagtnntttttttttttttttttttttttttttttt

SEQ ID NO: 4037 - DNA, 84 bp, Artificial
  Barcode component
  misc_feature (33)..(34): n is a, c, g, or t
  misc_feature (43)..(44): n is a, c, g, or t
  misc_feature (53)..(54): n is a, c, g, or t
tttttttaagcagtggtatcaacgcagagtacnngttcgagannccaagtagnntttttttttttttttttttttttttttttt

SEQ ID NO: 4038 - DNA, 84 bp, Artificial
  Barcode component
  misc_feature (33)..(34): n is a, c, g, or t
  misc_feature (43)..(44): n is a, c, g, or t
  misc_feature (53)..(54): n is a, c, g, or t
tttttttaagcagtggtatcaacgcagagtacnngttcgagannctgaacagnntttttttttttttttttttttttttttttt

SEQ ID NO: 4039 - DNA, 84 bp, Artificial
  Barcode component
  misc_feature (33)..(34): n is a, c, g, or t
  misc_feature (43)..(44): n is a, c, g, or t
  misc_feature (53)..(54): n is a, c, g, or t
tttttttaagcagtggtatcaacgcagagtacnngttcgaganngtaggttcnntttttttttttttttttttttttttttttt

SEQ ID NO: 4040 - DNA, 84 bp, Artificial
  Barcode component
  misc_feature (33)..(34): n is a, c, g, or t
  misc_feature (43)..(44): n is a, c, g, or t
  misc_feature (53)..(54): n is a, c, g, or t
tttttttaagcagtggtatcaacgcagagtacnngttcgaganngtatggacnntttttttttttttttttttttttttttttt

SEQ ID NO: 4041 - DNA, 84 bp, Artificial
  Barcode component
  misc_feature (33)..(34): n is a, c, g, or t
  misc_feature (43)..(44): n is a, c, g, or t
  misc_feature (53)..(54): n is a, c, g, or t
tttttttaagcagtggtatcaacgcagagtacnngttcgaganntcgcaacanntttttttttttttttttttttttttttttt

SEQ ID NO: 4042 - DNA, 84 bp, Artificial
  Barcode component
  misc_feature (33)..(34): n is a, c, g, or t
  misc_feature (43)..(44): n is a, c, g, or t
  misc_feature (53)..(54): n is a, c, g, or t
tttttttaagcagtggtatcaacgcagagtacnngttcgagannccgctaatnntttttttttttttttttttttttttttttt

SEQ ID NO: 4043 - DNA, 84 bp, Artificial
  Barcode component
  misc_feature (33)..(34): n is a, c, g, or t
  misc_feature (43)..(44): n is a, c, g, or t
  misc_feature (53)..(54): n is a, c, g, or t
tttttttaagcagtggtatcaacgcagagtacnngttcgaganngattcgcanntttttttttttttttttttttttttttttt

SEQ ID NO: 4044 - DNA, 84 bp, Artificial
  Barcode component
  misc_feature (33)..(34): n is a, c, g, or t
  misc_feature (43)..(44): n is a, c, g, or t
  misc_feature (53)..(54): n is a, c, g, or t
tttttttaagcagtggtatcaacgcagagtacnngttcgaganncgatggaanntttttttttttttttttttttttttttttt

SEQ ID NO: 4045 - DNA, 84 bp, Artificial
  Barcode component
  misc_feature (33)..(34): n is a, c, g, or t
  misc_feature (43)..(44): n is a, c, g, or t
  misc_feature (53)..(54): n is a, c, g, or t
tttttttaagcagtggtatcaacgcagagtacnngttcgagannagcaagganntttttttttttttttttttttttttttttt

SEQ ID NO: 4046 - DNA, 84 bp, Artificial
  Barcode component
  misc_feature (33)..(34): n is a, c, g, or t
  misc_feature (43)..(44): n is a, c, g, or t
  misc_feature (53)..(54): n is a, c, g, or t
tttttttaagcagtggtatcaacgcagagtacnngttcgaganncgtagcaanntttttttttttttttttttttttttttttt

SEQ ID NO: 4047 - DNA, 84 bp, Artificial
  Barcode component
  misc_feature (33)..(34): n is a, c, g, or t
  misc_feature (43)..(44): n is a, c, g, or t
  misc_feature (53)..(54): n is a, c, g, or t
tttttttaagcagtggtatcaacgcagagtacnngttcgaganntggcagtanntttttttttttttttttttttttttttttt

SEQ ID NO: 4048 - DNA, 84 bp, Artificial
  Barcode component
  misc_feature (33)..(34): n is a, c, g, or t
  misc_feature (43)..(44): n is a, c, g, or t
  misc_feature (53)..(54): n is a, c, g, or t
tttttttaagcagtggtatcaacgcagagtacnngttcgaganncggtagttnntttttttttttttttttttttttttttttt

SEQ ID NO: 4049 - DNA, 84 bp, Artificial
  Barcode component
  misc_feature (33)..(34): n is a, c, g, or t
  misc_feature (43)..(44): n is a, c, g, or t
  misc_feature (53)..(54): n is a, c, g, or t
tttttttaagcagtggtatcaacgcagagtacnngttcgaganntgacttcgnntttttttttttttttttttttttttttttt

SEQ ID NO: 4050 - DNA, 84 bp, Artificial
  Barcode component
  misc_feature (33)..(34): n is a, c, g, or t
  misc_feature (43)..(44): n is a, c, g, or t
  misc_feature (53)..(54): n is a, c, g, or t
tttttttaagcagtggtatcaacgcagagtacnngttcgaganngagtgcaanntttttttttttttttttttttttttttttt

SEQ ID NO: 4051 - DNA, 84 bp, Artificial
  Barcode component
  misc_feature (33)..(34): n is a, c, g, or t
  misc_feature (43)..(44): n is a, c, g, or t
  misc_feature (53)..(54): n is a, c, g, or t
tttttttaagcagtggtatcaacgcagagtacnngttcgagannacggtaacnntttttttttttttttttttttttttttttt

SEQ ID NO: 4052 - DNA, 84 bp, Artificial
  Barcode component
  misc_feature (33)..(34): n is a, c, g, or t
  misc_feature (43)..(44): n is a, c, g, or t
  misc_feature (53)..(54): n is a, c, g, or t
tttttttaagcagtggtatcaacgcagagtacnngttcgagannaagtggtgnntttttttttttttttttttttttttttttt

SEQ ID NO: 4053 - DNA, 84 bp, Artificial
  Barcode component
  misc_feature (33)..(34): n is a, c, g, or t
  misc_feature (43)..(44): n is a, c, g, or t
  misc_feature (53)..(54): n is a, c, g, or t
tttttttaagcagtggtatcaacgcagagtacnngttcgagannggagacaanntttttttttttttttttttttttttttttt

SEQ ID NO: 4054 - DNA, 84 bp, Artificial
  Barcode component
  misc_feature (33)..(34): n is a, c, g, or t
  misc_feature (43)..(44): n is a, c, g, or t
  misc_feature (53)..(54): n is a, c, g, or t
tttttttaagcagtggtatcaacgcagagtacnngttcgaganntcaaggacnntttttttttttttttttttttttttttttt

SEQ ID NO: 4055 - DNA, 84 bp, Artificial
  Barcode component
  misc_feature (33)..(34): n is a, c, g, or t
  misc_feature (43)..(44): n is a, c, g, or t
  misc_feature (53)..(54): n is a, c, g, or t
tttttttaagcagtggtatcaacgcagagtacnngttcgagannaagagagcnntttttttttttttttttttttttttttttt

SEQ ID NO: 4056 - DNA, 84 bp, Artificial
  Barcode component
  misc_feature (33)..(34): n is a, c, g, or t
  misc_feature (43)..(44): n is a, c, g, or t
  misc_feature (53)..(54): n is a, c, g, or t
tttttttaagcagtggtatcaacgcagagtacnngttcgaganncgagagatnntttttttttttttttttttttttttttttt

SEQ ID NO: 4057 - DNA, 84 bp, Artificial
  Barcode component
  misc_feature (33)..(34): n is a, c, g, or t
  misc_feature (43)..(44): n is a, c, g, or t
  misc_feature (53)..(54): n is a, c, g, or t
tttttttaagcagtggtatcaacgcagagtacnngttcgagannacagatggnntttttttttttttttttttttttttttttt

SEQ ID NO: 4058 - DNA, 84 bp, Artificial
  Barcode component
  misc_feature (33)..(34): n is a, c, g, or t
  misc_feature (43)..(44): n is a, c, g, or t
  misc_feature (53)..(54): n is a, c, g, or t
tttttttaagcagtggtatcaacgcagagtacnngttcgagannaggagtcanntttttttttttttttttttttttttttttt

SEQ ID NO: 4059 - DNA, 84 bp, Artificial
  Barcode component
  misc_feature (33)..(34): n is a, c, g, or t
  misc_feature (43)..(44): n is a, c, g, or t
  misc_feature (53)..(54): n is a, c, g, or t
tttttttaagcagtggtatcaacgcagagtacnngttcgaganncgtgttacnntttttttttttttttttttttttttttttt

SEQ ID NO: 4060 - DNA, 84 bp, Artificial
  Barcode component
  misc_feature (33)..(34): n is a, c, g, or t
  misc_feature (43)..(44): n is a, c, g, or t
  misc_feature (53)..(54): n is a, c, g, or t
tttttttaagcagtggtatcaacgcagagtacnngttcgaganntagtgtgcnntttttttttttttttttttttttttttttt

SEQ ID NO: 4061 - DNA, 84 bp, Artificial
  Barcode component
  misc_feature (33)..(34): n is a, c, g, or t
  misc_feature (43)..(44): n is a, c, g, or t
  misc_feature (53)..(54): n is a, c, g, or t
tttttttaagcagtggtatcaacgcagagtacnngttcgagannctcatgacnntttttttttttttttttttttttttttttt

SEQ ID NO: 4062 - DNA, 84 bp, Artificial
  Barcode component
  misc_feature (33)..(34): n is a, c, g, or t
  misc_feature (43)..(44): n is a, c, g, or t
  misc_feature (53)..(54): n is a, c, g, or t
tttttttaagcagtggtatcaacgcagagtacnngttcgaganngtatccagnntttttttttttttttttttttttttttttt

SEQ ID NO: 4063 - DNA, 84 bp, Artificial
  Barcode component
  misc_feature (33)..(34): n is a, c, g, or t
  misc_feature (43)..(44): n is a, c, g, or t
  misc_feature (53)..(54): n is a, c, g, or t
tttttttaagcagtggtatcaacgcagagtacnngttcgagannacgcctatnntttttttttttttttttttttttttttttt

SEQ ID NO: 4064 - DNA, 84 bp, Artificial
  Barcode component
  misc_feature (33)..(34): n is a, c, g, or t
  misc_feature (43)..(44): n is a, c, g, or t
  misc_feature (53)..(54): n is a, c, g, or t
tttttttaagcagtggtatcaacgcagagtacnngttcgagannaacgacctnntttttttttttttttttttttttttttttt

SEQ ID NO: 4065 - DNA, 84 bp, Artificial
  Barcode component
  misc_feature (33)..(34): n is a, c, g, or t
  misc_feature (43)..(44): n is a, c, g, or t
  misc_feature (53)..(54): n is a, c, g, or t
tttttttaagcagtggtatcaacgcagagtacnngttcgagannatcaggctnntttttttttttttttttttttttttttttt

SEQ ID NO: 4066 - DNA, 84 bp, Artificial
  Barcode component
  misc_feature (33)..(34): n is a, c, g, or t
  misc_feature (43)..(44): n is a, c, g, or t
  misc_feature (53)..(54): n is a, c, g, or t
tttttttaagcagtggtatcaacgcagagtacnngttcgaganncaagttcgnntttttttttttttttttttttttttttttt

SEQ ID NO: 4067 - DNA, 84 bp, Artificial
  Barcode component
  misc_feature (33)..(34): n is a, c, g, or t
  misc_feature (43)..(44): n is a, c, g, or t
  misc_feature (53)..(54): n is a, c, g, or t
tttttttaagcagtggtatcaacgcagagtacnngttcgaganntagccaganntttttttttttttttttttttttttttttt

SEQ ID NO: 4068 - DNA, 84 bp, Artificial
  Barcode component
  misc_feature (33)..(34): n is a, c, g, or t
  misc_feature (43)..(44): n is a, c, g, or t
  misc_feature (53)..(54): n is a, c, g, or t
tttttttaagcagtggtatcaacgcagagtacnngttcgaganncaatcacgnntttttttttttttttttttttttttttttt

SEQ ID NO: 4069 - DNA, 84 bp, Artificial
  Barcode component
  misc_feature (33)..(34): n is a, c, g, or t
  misc_feature (43)..(44): n is a, c, g, or t
  misc_feature (53)..(54): n is a, c, g, or t
tttttttaagcagtggtatcaacgcagagtacnngttcgaganngcaacaagnntttttttttttttttttttttttttttttt

SEQ ID NO: 4070 - DNA, 84 bp, Artificial
  Barcode component
  misc_feature (33)..(34): n is a, c, g, or t
  misc_feature (43)..(44): n is a, c, g, or t
  misc_feature (53)..(54): n is a, c, g, or t
tttttttaagcagtggtatcaacgcagagtacnngttcgaganncacgacaanntttttttttttttttttttttttttttttt

SEQ ID NO: 4071 - DNA, 84 bp, Artificial
  Barcode component
  misc_feature (33)..(34): n is a, c, g, or t
  misc_feature (43)..(44): n is a, c, g, or t
  misc_feature (53)..(54): n is a, c, g, or t
tttttttaagcagtggtatcaacgcagagtacnngttcgaganntacggaganntttttttttttttttttttttttttttttt

SEQ ID NO: 4072 - DNA, 84 bp, Artificial
  Barcode component
  misc_feature (33)..(34): n is a, c, g, or t
  misc_feature (43)..(44): n is a, c, g, or t
  misc_feature (53)..(54): n is a, c, g, or t
tttttttaagcagtggtatcaacgcagagtacnngttcgaganncgacaaganntttttttttttttttttttttttttttttt

SEQ ID NO: 4073 - DNA, 84 bp, Artificial
  Barcode component
  misc_feature (33)..(34): n is a, c, g, or t
  misc_feature (43)..(44): n is a, c, g, or t
  misc_feature (53)..(54): n is a, c, g, or t
tttttttaagcagtggtatcaacgcagagtacnngttcgaganncgaagtganntttttttttttttttttttttttttttttt

SEQ ID NO: 4074 - DNA, 84 bp, Artificial
  Barcode component
  misc_feature (33)..(34): n is a, c, g, or t
  misc_feature (43)..(44): n is a, c, g, or t
  misc_feature (53)..(54): n is a, c, g, or t
tttttttaagcagtggtatcaacgcagagtacnngttcgagannagctggtanntttttttttttttttttttttttttttttt

SEQ ID NO: 4075 - DNA, 84 bp, Artificial
  Barcode component
  misc_feature (33)..(34): n is a, c, g, or t
  misc_feature (43)..(44): n is a, c, g, or t
  misc_feature (53)..(54): n is a, c, g, or t
tttttttaagcagtggtatcaacgcagagtacnngttcgagannaactaggcnntttttttttttttttttttttttttttttt

SEQ ID NO: 4076 - DNA, 84 bp, Artificial
  Barcode component
  misc_feature (33)..(34): n is a, c, g, or t
  misc_feature (43)..(44): n is a, c, g, or t
  misc_feature (53)..(54): n is a, c, g, or t
tttttttaagcagtggtatcaacgcagagtacnngttcgaganncagcaagtnntttttttttttttttttttttttttttttt

SEQ ID NO: 4077 - DNA, 84 bp, Artificial
  Barcode component
  misc_feature (33)..(34): n is a, c, g, or t
  misc_feature (43)..(44): n is a, c, g, or t
  misc_feature (53)..(54): n is a, c, g, or t
tttttttaagcagtggtatcaacgcagagtacnngttcgagannacgaggtanntttttttttttttttttttttttttttttt

SEQ ID NO: 4078 - DNA, 84 bp, Artificial
  Barcode component
  misc_feature (33)..(34): n is a, c, g, or t
  misc_feature (43)..(44): n is a, c, g, or t
  misc_feature (53)..(54): n is a, c, g, or t
tttttttaagcagtggtatcaacgcagagtacnngttcgaganncatcttccnntttttttttttttttttttttttttttttt

SEQ ID NO: 4079 - DNA, 84 bp, Artificial
  Barcode component
  misc_feature (33)..(34): n is a, c, g, or t
  misc_feature (43)..(44): n is a, c, g, or t
  misc_feature (53)..(54): n is a, c, g, or t
tttttttaagcagtggtatcaacgcagagtacnngttcgaganncctgaatcnntttttttttttttttttttttttttttttt

SEQ ID NO: 4080 - DNA, 84 bp, Artificial
  Barcode component
  misc_feature (33)..(34): n is a, c, g, or t
  misc_feature (43)..(44): n is a, c, g, or t
  misc_feature (53)..(54): n is a, c, g, or t
tttttttaagcagtggtatcaacgcagagtacnngttcgaganntgcagactnntttttttttttttttttttttttttttttt

SEQ ID NO: 4081 - DNA, 84 bp, Artificial
  Barcode component
  misc_feature (33)..(34): n is a, c, g, or t
  misc_feature (43)..(44): n is a, c, g, or t
  misc_feature (53)..(54): n is a, c, g, or t
tttttttaagcagtggtatcaacgcagagtacnngttcgagannagatgtggnntttttttttttttttttttttttttttttt

SEQ ID NO: 4082 - DNA, 84 bp, Artificial
  Barcode component
  misc_feature (33)..(34): n is a, c, g, or t
  misc_feature (43)..(44): n is a, c, g, or t
  misc_feature (53)..(54): n is a, c, g, or t
tttttttaagcagtggtatcaacgcagagtacnngttcgagannagttcgacnntttttttttttttttttttttttttttttt

SEQ ID NO: 4083 - DNA, 84 bp, Artificial
  Barcode component
  misc_feature (33)..(34): n is a, c, g, or t
  misc_feature (43)..(44): n is a, c, g, or t
  misc_feature (53)..(54): n is a, c, g, or t
tttttttaagcagtggtatcaacgcagagtacnngttcgagannacaacctcnntttttttttttttttttttttttttttttt

SEQ ID NO: 4084 - DNA, 84 bp, Artificial
  Barcode component
  misc_feature (33)..(34): n is a, c, g, or t
  misc_feature (43)..(44): n is a, c, g, or t
  misc_feature (53)..(54): n is a, c, g, or t
tttttttaagcagtggtatcaacgcagagtacnngttcgaganncatggtagnntttttttttttttttttttttttttttttt

SEQ ID NO: 4085 - DNA, 84 bp, Artificial
  Barcode component
  misc_feature (33)..(34): n is a, c, g, or t
  misc_feature (43)..(44): n is a, c, g, or t
  misc_feature (53)..(54): n is a, c, g, or t
tttttttaagcagtggtatcaacgcagagtacnngttcgaganncgtatctcnntttttttttttttttttttttttttttttt

SEQ ID NO: 4086 - DNA, 84 bp, Artificial
  Barcode component
  misc_feature (33)..(34): n is a, c, g, or t
  misc_feature (43)..(44): n is a, c, g, or t
  misc_feature (53)..(54): n is a, c, g, or t
tttttttaagcagtggtatcaacgcagagtacnngttcgaganncctagttcnntttttttttttttttttttttttttttttt

SEQ ID NO: 4087 - DNA, 84 bp, Artificial
  Barcode component
  misc_feature (33)..(34): n is a, c, g, or t
  misc_feature (43)..(44): n is a, c, g, or t
  misc_feature (53)..(54): n is a, c, g, or t
tttttttaagcagtggtatcaacgcagagtacnngttcgaganncaagagtcnntttttttttttttttttttttttttttttt

SEQ ID NO: 4088 - DNA, 84 bp, Artificial
  Barcode component
  misc_feature (33)..(34): n is a, c, g, or t
  misc_feature (43)..(44): n is a, c, g, or t
  misc_feature (53)..(54): n is a, c, g, or t
tttttttaagcagtggtatcaacgcagagtacnntcctaggtnnaatcggcanntttttttttttttttttttttttttttttt

SEQ ID NO: 4089 - DNA, 84 bp, Artificial
  Barcode component
  misc_feature (33)..(34): n is a, c, g, or t
  misc_feature (43)..(44): n is a, c, g, or t
  misc_feature (53)..(54): n is a, c, g, or t
tttttttaagcagtggtatcaacgcagagtacnntcctaggtnntacggcatnntttttttttttttttttttttttttttttt

SEQ ID NO: 4090 - DNA, 84 bp, Artificial
  Barcode component
  misc_feature (33)..(34): n is a, c, g, or t
  misc_feature (43)..(44): n is a, c, g, or t
  misc_feature (53)..(54): n is a, c, g, or t
tttttttaagcagtggtatcaacgcagagtacnntcctaggtnnttggatcgnntttttttttttttttttttttttttttttt

SEQ ID NO: 4091 - DNA, 84 bp, Artificial
  Barcode component
  misc_feature (33)..(34): n is a, c, g, or t
  misc_feature (43)..(44): n is a, c, g, or t
  misc_feature (53)..(54): n is a, c, g, or t
tttttttaagcagtggtatcaacgcagagtacnntcctaggtnntggaacganntttttttttttttttttttttttttttttt

SEQ ID NO: 4092 - DNA, 84 bp, Artificial
  Barcode component
  misc_feature (33)..(34): n is a, c, g, or t
  misc_feature (43)..(44): n is a, c, g, or t
  misc_feature (53)..(54): n is a, c, g, or t
tttttttaagcagtggtatcaacgcagagtacnntcctaggtnnggcaatcanntttttttttttttttttttttttttttttt

SEQ ID NO: 4093 - DNA, 84 bp, Artificial
  Barcode component
  misc_feature (33)..(34): n is a, c, g, or t
  misc_feature (43)..(44): n is a, c, g, or t
  misc_feature (53)..(54): n is a, c, g, or t
tttttttaagcagtggtatcaacgcagagtacnntcctaggtnngaatccganntttttttttttttttttttttttttttttt

SEQ ID NO: 4094 - DNA, 84 bp, Artificial
  Barcode component
  misc_feature (33)..(34): n is a, c, g, or t
  misc_feature (43)..(44): n is a, c, g, or t
  misc_feature (53)..(54): n is a, c, g, or t
tttttttaagcagtggtatcaacgcagagtacnntcctaggtnnttacggtgnntttttttttttttttttttttttttttttt

SEQ ID NO: 4095 - DNA, 84 bp, Artificial
  Barcode component
  misc_feature (33)..(34): n is a, c, g, or t
  misc_feature (43)..(44): n is a, c, g, or t
  misc_feature (53)..(54): n is a, c, g, or t
tttttttaagcagtggtatcaacgcagagtacnntcctaggtnncatatcggnntttttttttttttttttttttttttttttt

SEQ ID NO: 4096 - DNA, 84 bp, Artificial
  Barcode component
  misc_feature (33)..(34): n is a, c, g, or t
  misc_feature (43)..(44): n is a, c, g, or t
  misc_feature (53)..(54): n is a, c, g, or t
tttttttaagcagtggtatcaacgcagagtacnntcctaggtnncttcggtanntttttttttttttttttttttttttttttt

SEQ ID NO: 4097 - DNA, 84 bp, Artificial
  Barcode component
  misc_feature (33)..(34): n is a, c, g, or t
  misc_feature (43)..(44): n is a, c, g, or t
  misc_feature (53)..(54): n is a, c, g, or t
tttttttaagcagtggtatcaacgcagagtacnntcctaggtnntcctaacgnntttttttttttttttttttttttttttttt

SEQ ID NO: 4098 - DNA, 84 bp, Artificial
  Barcode component
  misc_feature (33)..(34): n is a, c, g, or t
  misc_feature (43)..(44): n is a, c, g, or t
  misc_feature (53)..(54): n is a, c, g, or t
tttttttaagcagtggtatcaacgcagagtacnntcctaggtnngtaagccanntttttttttttttttttttttttttttttt

SEQ ID NO: 4099 - DNA, 84 bp, Artificial
  Barcode component
  misc_feature (33)..(34): n is a, c, g, or t
  misc_feature (43)..(44): n is a, c, g, or t
  misc_feature (53)..(54): n is a, c, g, or t
tttttttaagcagtggtatcaacgcagagtacnntcctaggtnntaaggtggnntttttttttttttttttttttttttttttt

SEQ ID NO: 4100 - DNA, 84 bp, Artificial
  Barcode component
  misc_feature (33)..(34): n is a, c, g, or t
  misc_feature (43)..(44): n is a, c, g, or t
  misc_feature (53)..(54): n is a, c, g, or t
tttttttaagcagtggtatcaacgcagagtacnntcctaggtnnggtaagctnntttttttttttttttttttttttttttttt

SEQ ID NO: 4101 - DNA, 84 bp, Artificial
  Barcode component
  misc_feature (33)..(34): n is a, c, g, or t
  misc_feature (43)..(44): n is a, c, g, or t
  misc_feature (53)..(54): n is a, c, g, or t
tttttttaagcagtggtatcaacgcagagtacnntcctaggtnntgtgtcganntttttttttttttttttttttttttttttt

SEQ ID NO: 4102 - DNA, 84 bp, Artificial
  Barcode component
  misc_feature (33)..(34): n is a, c, g, or t
  misc_feature (43)..(44): n is a, c, g, or t
  misc_feature (53)..(54): n is a, c, g, or t
tttttttaagcagtggtatcaacgcagagtacnntcctaggtnngagcatganntttttttttttttttttttttttttttttt

SEQ ID NO: 4103 - DNA, 84 bp, Artificial
  Barcode component
  misc_feature (33)..(34): n is a, c, g, or t
  misc_feature (43)..(44): n is a, c, g, or t
  misc_feature (53)..(54): n is a, c, g, or t
tttttttaagcagtggtatcaacgcagagtacnntcctaggtnntcgaagtcnntttttttttttttttttttttttttttttt

SEQ ID NO: 4104 - DNA, 84 bp, Artificial
  Barcode component
  misc_feature (33)..(34): n is a, c, g, or t
  misc_feature (43)..(44): n is a, c, g, or t
  misc_feature (53)..(54): n is a, c, g, or t
tttttttaagcagtggtatcaacgcagagtacnntcctaggtnnggtgaacanntttttttttttttttttttttttttttttt

SEQ ID NO: 4105 - DNA, 84 bp, Artificial
  Barcode component
  misc_feature (33)..(34): n is a, c, g, or t
  misc_feature (43)..(44): n is a, c, g, or t
  misc_feature (53)..(54): n is a, c, g, or t
tttttttaagcagtggtatcaacgcagagtacnntcctaggtnnacatgcacnntttttttttttttttttttttttttttttt

SEQ ID NO: 4106 - DNA, 84 bp, Artificial
  Barcode component
  misc_feature (33)..(34): n is a, c, g, or t
  misc_feature (43)..(44): n is a, c, g, or t
  misc_feature (53)..(54): n is a, c, g, or t
tttttttaagcagtggtatcaacgcagagtacnntcctaggtnnccaacagtnntttttttttttttttttttttttttttttt

SEQ ID NO: 4107 - DNA, 84 bp, Artificial
  Barcode component
  misc_feature (33)..(34): n is a, c, g, or t
  misc_feature (43)..(44): n is a, c, g, or t
  misc_feature (53)..(54): n is a, c, g, or t
tttttttaagcagtggtatcaacgcagagtacnntcctaggtnnagaacagcnntttttttttttttttttttttttttttttt

SEQ ID NO: 4108 - DNA, 84 bp, Artificial
  Barcode component
  misc_feature (33)..(34): n is a, c, g, or t
  misc_feature (43)..(44): n is a, c, g, or t
  misc_feature (53)..(54): n is a, c, g, or t
tttttttaagcagtggtatcaacgcagagtacnntcctaggtnngaacacgtnntttttttttttttttttttttttttttttt

SEQ ID NO: 4109 - DNA, 84 bp, Artificial
  Barcode component
  misc_feature (33)..(34): n is a, c, g, or t
  misc_feature (43)..(44): n is a, c, g, or t
  misc_feature (53)..(54): n is a, c, g, or t
tttttttaagcagtggtatcaacgcagagtacnntcctaggtnnggtcttcanntttttttttttttttttttttttttttttt

SEQ ID NO: 4110 - DNA, 84 bp, Artificial
  Barcode component
  misc_feature (33)..(34): n is a, c, g, or t
  misc_feature (43)..(44): n is a, c, g, or t
  misc_feature (53)..(54): n is a, c, g, or t
tttttttaagcagtggtatcaacgcagagtacnntcctaggtnnaggttcagnntttttttttttttttttttttttttttttt

SEQ ID NO: 4111 - DNA, 84 bp, Artificial
  Barcode component
  misc_feature (33)..(34): n is a, c, g, or t
  misc_feature (43)..(44): n is a, c, g, or t
  misc_feature (53)..(54): n is a, c, g, or t
tttttttaagcagtggtatcaacgcagagtacnntcctaggtnnctagagcanntttttttttttttttttttttttttttttt

SEQ ID NO: 4112 - DNA, 84 bp, Artificial
  Barcode component
  misc_feature (33)..(34): n is a, c, g, or t
  misc_feature (43)..(44): n is a, c, g, or t
  misc_feature (53)..(54): n is a, c, g, or t
tttttttaagcagtggtatcaacgcagagtacnntcctaggtnncttctagcnntttttttttttttttttttttttttttttt

SEQ ID NO: 4113 - DNA, 84 bp, Artificial
  Barcode component
  misc_feature (33)..(34): n is a, c, g, or t
  misc_feature (43)..(44): n is a, c, g, or t
  misc_feature (53)..(54): n is a, c, g, or t
tttttttaagcagtggtatcaacgcagagtacnntcctaggtnngagtaacgnntttttttttttttttttttttttttttttt

SEQ ID NO: 4114 - DNA, 84 bp, Artificial
  Barcode component
  misc_feature (33)..(34): n is a, c, g, or t
  misc_feature (43)..(44): n is a, c, g, or t
  misc_feature (53)..(54): n is a, c, g, or t
tttttttaagcagtggtatcaacgcagagtacnntcctaggtnnctaagaggnntttttttttttttttttttttttttttttt

SEQ ID NO: 4115 - DNA, 84 bp, Artificial
  Barcode component
  misc_feature (33)..(34): n is a, c, g, or t
  misc_feature (43)..(44): n is a, c, g, or t
  misc_feature (53)..(54): n is a, c, g, or t
tttttttaagcagtggtatcaacgcagagtacnntcctaggtnnacgtgtagnntttttttttttttttttttttttttttttt

SEQ ID NO: 4116 - DNA, 84 bp, Artificial
  Barcode component
  misc_feature (33)..(34): n is a, c, g, or t
  misc_feature (43)..(44): n is a, c, g, or t
  misc_feature (53)..(54): n is a, c, g, or t
tttttttaagcagtggtatcaacgcagagtacnntcctaggtnnactacaggnntttttttttttttttttttttttttttttt

SEQ ID NO: 4117 - DNA, 84 bp, Artificial
  Barcode component
  misc_feature (33)..(34): n is a, c, g, or t
  misc_feature (43)..(44): n is a, c, g, or t
  misc_feature (53)..(54): n is a, c, g, or t
tttttttaagcagtggtatcaacgcagagtacnntcctaggtnntacaggtcnntttttttttttttttttttttttttttttt

SEQ ID NO: 4118 - DNA, 84 bp, Artificial
  Barcode component
  misc_feature (33)..(34): n is a, c, g, or t
  misc_feature (43)..(44): n is a, c, g, or t
  misc_feature (53)..(54): n is a, c, g, or t
tttttttaagcagtggtatcaacgcagagtacnntcctaggtnnctcacatgnntttttttttttttttttttttttttttttt

SEQ ID NO: 4119 - DNA, 84 bp, Artificial
  Barcode component
  misc_feature (33)..(34): n is a, c, g, or t
  misc_feature (43)..(44): n is a, c, g, or t
  misc_feature (53)..(54): n is a, c, g, or t
tttttttaagcagtggtatcaacgcagagtacnntcctaggtnnactaggagnntttttttttttttttttttttttttttttt

SEQ ID NO: 4120 - DNA, 84 bp, Artificial
  Barcode component
  misc_feature (33)..(34): n is a, c, g, or t
  misc_feature (43)..(44): n is a, c, g, or t
  misc_feature (53)..(54): n is a, c, g, or t
tttttttaagcagtggtatcaacgcagagtacnntcctaggtnnccatagganntttttttttttttttttttttttttttttt

SEQ ID NO: 4121 - DNA, 84 bp, Artificial
  Barcode component
  misc_feature (33)..(34): n is a, c, g, or t
  misc_feature (43)..(44): n is a, c, g, or t
  misc_feature (53)..(54): n is a, c, g, or t
tttttttaagcagtggtatcaacgcagagtacnntcctaggtnnggagaatcnntttttttttttttttttttttttttttttt

SEQ ID NO: 4122 - DNA, 84 bp, Artificial
  Barcode component
  misc_feature (33)..(34): n is a, c, g, or t
  misc_feature (43)..(44): n is a, c, g, or t
  misc_feature (53)..(54): n is a, c, g, or t
tttttttaagcagtggtatcaacgcagagtacnntcctaggtnngccaagaanntttttttttttttttttttttttttttttt

SEQ ID NO: 4123 - DNA, 84 bp, Artificial
  Barcode component
  misc_feature (33)..(34): n is a, c, g, or t
  misc_feature (43)..(44): n is a, c, g, or t
  misc_feature (53)..(54): n is a, c, g, or t
tttttttaagcagtggtatcaacgcagagtacnntcctaggtnnaaggcaagnntttttttttttttttttttttttttttttt

SEQ ID NO: 4124 - DNA, 84 bp, Artificial
  Barcode component
  misc_feature (33)..(34): n is a, c, g, or t
  misc_feature (43)..(44): n is a, c, g, or t
  misc_feature (53)..(54): n is a, c, g, or t
tttttttaagcagtggtatcaacgcagagtacnntcctaggtnnaatgtcgcnntttttttttttttttttttttttttttttt

SEQ ID NO: 4125 - DNA, 84 bp, Artificial
  Barcode component
  misc_feature (33)..(34): n is a, c, g, or t
  misc_feature (43)..(44): n is a, c, g, or t
  misc_feature (53)..(54): n is a, c, g, or t
tttttttaagcagtggtatcaacgcagagtacnntcctaggtnnatggaaccnntttttttttttttttttttttttttttttt

SEQ ID NO: 4126 - DNA, 84 bp, Artificial
  Barcode component
  misc_feature (33)..(34): n is a, c, g, or t
  misc_feature (43)..(44): n is a, c, g, or t
  misc_feature (53)..(54): n is a, c, g, or t
tttttttaagcagtggtatcaacgcagagtacnntcctaggtnnagaggcatnntttttttttttttttttttttttttttttt

SEQ ID NO: 4127 - DNA, 84 bp, Artificial
  Barcode component
  misc_feature (33)..(34): n is a, c, g, or t
  misc_feature (43)..(44): n is a, c, g, or t
  misc_feature (53)..(54): n is a, c, g, or t
tttttttaagcagtggtatcaacgcagagtacnntcctaggtnntgcatagcnntttttttttttttttttttttttttttttt

SEQ ID NO: 4128 - DNA, 84 bp, Artificial
  Barcode component
  misc_feature (33)..(34): n is a, c, g, or t
  misc_feature (43)..(44): n is a, c, g, or t
  misc_feature (53)..(54): n is a, c, g, or t
tttttttaagcagtggtatcaacgcagagtacnntcctaggtnnctaacgganntttttttttttttttttttttttttttttt

SEQ ID NO: 4129 - DNA, 84 bp, Artificial
  Barcode component
  misc_feature (33)..(34): n is a, c, g, or t
  misc_feature (43)..(44): n is a, c, g, or t
  misc_feature (53)..(54): n is a, c, g, or t
tttttttaagcagtggtatcaacgcagagtacnntcctaggtnntatcgaggnntttttttttttttttttttttttttttttt

SEQ ID NO: 4130 - DNA, 84 bp, Artificial
  Barcode component
  misc_feature (33)..(34): n is a, c, g, or t
  misc_feature (43)..(44): n is a, c, g, or t
  misc_feature (53)..(54): n is a, c, g, or t
tttttttaagcagtggtatcaacgcagagtacnntcctaggtnncatagcctnntttttttttttttttttttttttttttttt

SEQ ID NO: 4131 - DNA, 84 bp, Artificial
  Barcode component
  misc_feature (33)..(34): n is a, c, g, or t
  misc_feature (43)..(44): n is a, c, g, or t
  misc_feature (53)..(54): n is a, c, g, or t
tttttttaagcagtggtatcaacgcagagtacnntcctaggtnnatcgagacnntttttttttttttttttttttttttttttt

SEQ ID NO: 4132 - DNA, 84 bp, Artificial
  Barcode component
  misc_feature (33)..(34): n is a, c, g, or t
  misc_feature (43)..(44): n is a, c, g, or t
  misc_feature (53)..(54): n is a, c, g, or t
tttttttaagcagtggtatcaacgcagagtacnntcctaggtnnggaagagtnntttttttttttttttttttttttttttttt

SEQ ID NO: 4133 - DNA, 84 bp, Artificial
  Barcode component
  misc_feature (33)..(34): n is a, c, g, or t
  misc_feature (43)..(44): n is a, c, g, or t
  misc_feature (53)..(54): n is a, c, g, or t
tttttttaagcagtggtatcaacgcagagtacnntcctaggtnnccaagtagnntttttttttttttttttttttttttttttt

SEQ ID NO: 4134 - DNA, 84 bp, Artificial
  Barcode component
  misc_feature (33)..(34): n is a, c, g, or t
  misc_feature (43)..(44): n is a, c, g, or t
  misc_feature (53)..(54): n is a, c, g, or t
tttttttaagcagtggtatcaacgcagagtacnntcctaggtnnctgaacagnntttttttttttttttttttttttttttttt

SEQ ID NO: 4135 - DNA, 84 bp, Artificial
  Barcode component
  misc_feature (33)..(34): n is a, c, g, or t
  misc_feature (43)..(44): n is a, c, g, or t
  misc_feature (53)..(54): n is a, c, g, or t
tttttttaagcagtggtatcaacgcagagtacnntcctaggtnngtaggttcnntttttttttttttttttttttttttttttt

SEQ ID NO: 4136 - DNA, 84 bp, Artificial
  Barcode component
  misc_feature (33)..(34): n is a, c, g, or t
  misc_feature (43)..(44): n is a, c, g, or t
  misc_feature (53)..(54): n is a, c, g, or t
tttttttaagcagtggtatcaacgcagagtacnntcctaggtnngtatggacnntttttttttttttttttttttttttttttt

SEQ ID NO: 4137 - DNA, 84 bp, Artificial
  Barcode component
  misc_feature (33)..(34): n is a, c, g, or t
  misc_feature (43)..(44): n is a, c, g, or t
  misc_feature (53)..(54): n is a, c, g, or t
tttttttaagcagtggtatcaacgcagagtacnntcctaggtnntcgcaacanntttttttttttttttttttttttttttttt

SEQ ID NO: 4138 - DNA, 84 bp, Artificial
  Barcode component
  misc_feature (33)..(34): n is a, c, g, or t
  misc_feature (43)..(44): n is a, c, g, or t
  misc_feature (53)..(54): n is a, c, g, or t
tttttttaagcagtggtatcaacgcagagtacnntcctaggtnnccgctaatnntttttttttttttttttttttttttttttt

SEQ ID NO: 4139 - DNA, 84 bp, Artificial
  Barcode component
  misc_feature (33)..(34): n is a, c, g, or t
  misc_feature (43)..(44): n is a, c, g, or t
  misc_feature (53)..(54): n is a, c, g, or t
tttttttaagcagtggtatcaacgcagagtacnntcctaggtnngattcgcanntttttttttttttttttttttttttttttt

SEQ ID NO: 4140 - DNA, 84 bp, Artificial
  Barcode component
  misc_feature (33)..(34): n is a, c, g, or t
  misc_feature (43)..(44): n is a, c, g, or t
  misc_feature (53)..(54): n is a, c, g, or t
tttttttaagcagtggtatcaacgcagagtacnntcctaggtnncgatggaanntttttttttttttttttttttttttttttt

SEQ ID NO: 4141 - DNA, 84 bp, Artificial
  Barcode component
  misc_feature (33)..(34): n is a, c, g, or t
  misc_feature (43)..(44): n is a, c, g, or t
  misc_feature (53)..(54): n is a, c, g, or t
tttttttaagcagtggtatcaacgcagagtacnntcctaggtnnagcaagganntttttttttttttttttttttttttttttt

SEQ ID NO: 4142 - DNA, 84 bp, Artificial
  Barcode component
  misc_feature (33)..(34): n is a, c, g, or t
  misc_feature (43)..(44): n is a, c, g, or t
  misc_feature (53)..(54): n is a, c, g, or t
tttttttaagcagtggtatcaacgcagagtacnntcctaggtnncgtagcaanntttttttttttttttttttttttttttttt

SEQ ID NO: 4143 - DNA, 84 bp, Artificial
  Barcode component
  misc_feature (33)..(34): n is a, c, g, or t
  misc_feature (43)..(44): n is a, c, g, or t
  misc_feature (53)..(54): n is a, c, g, or t
tttttttaagcagtggtatcaacgcagagtacnntcctaggtnntggcagtanntttttttttttttttttttttttttttttt

SEQ ID NO: 4144 - DNA, 84 bp, Artificial
  Barcode component
  misc_feature (33)..(34): n is a, c, g, or t
  misc_feature (43)..(44): n is a, c, g, or t
  misc_feature (53)..(54): n is a, c, g, or t
tttttttaagcagtggtatcaacgcagagtacnntcctaggtnncggtagttnntttttttttttttttttttttttttttttt

SEQ ID NO: 4145 - DNA, 84 bp, Artificial
  Barcode component
  misc_feature (33)..(34): n is a, c, g, or t
  misc_feature (43)..(44): n is a, c, g, or t
  misc_feature (53)..(54): n is a, c, g, or t
tttttttaagcagtggtatcaacgcagagtacnntcctaggtnntgacttcgnntttttttttttttttttttttttttttttt

SEQ ID NO: 4146 - DNA, 84 bp, Artificial
  Barcode component
  misc_feature (33)..(34): n is a, c, g, or t
  misc_feature (43)..(44): n is a, c, g, or t
  misc_feature (53)..(54): n is a, c, g, or t
tttttttaagcagtggtatcaacgcagagtacnntcctaggtnngagtgcaanntttttttttttttttttttttttttttttt

SEQ ID NO: 4147 - DNA, 84 bp, Artificial
  Barcode component
  misc_feature (33)..(34): n is a, c, g, or t
  misc_feature (43)..(44): n is a, c, g, or t
  misc_feature (53)..(54): n is a, c, g, or t
tttttttaagcagtggtatcaacgcagagtacnntcctaggtnnacggtaacnntttttttttttttttttttttttttttttt

SEQ ID NO: 4148 - DNA, 84 bp, Artificial
  Barcode component
  misc_feature (33)..(34): n is a, c, g, or t
  misc_feature (43)..(44): n is a, c, g, or t
  misc_feature (53)..(54): n is a, c, g, or t
tttttttaagcagtggtatcaacgcagagtacnntcctaggtnnaagtggtgnntttttttttttttttttttttttttttttt

SEQ ID NO: 4149 - DNA, 84 bp, Artificial
  Barcode component
  misc_feature (33)..(34): n is a, c, g, or t
  misc_feature (43)..(44): n is a, c, g, or t
  misc_feature (53)..(54): n is a, c, g, or t
tttttttaagcagtggtatcaacgcagagtacnntcctaggtnnggagacaanntttttttttttttttttttttttttttttt

SEQ ID NO: 4150 - DNA, 84 bp, Artificial
  Barcode component
  misc_feature (33)..(34): n is a, c, g, or t
  misc_feature (43)..(44): n is a, c, g, or t
  misc_feature (53)..(54): n is a, c, g, or t
tttttttaagcagtggtatcaacgcagagtacnntcctaggtnntcaaggacnntttttttttttttttttttttttttttttt

SEQ ID NO: 4151 - DNA, 84 bp, Artificial
  Barcode component
  misc_feature (33)..(34): n is a, c, g, or t
  misc_feature (43)..(44): n is a, c, g, or t
  misc_feature (53)..(54): n is a, c, g, or t
tttttttaagcagtggtatcaacgcagagtacnntcctaggtnnaagagagcnntttttttttttttttttttttttttttttt

SEQ ID NO: 4152 - DNA, 84 bp, Artificial
  Barcode component
  misc_feature (33)..(34): n is a, c, g, or t
  misc_feature (43)..(44): n is a, c, g, or t
  misc_feature (53)..(54): n is a, c, g, or t
tttttttaagcagtggtatcaacgcagagtacnntcctaggtnncgagagatnntttttttttttttttttttttttttttttt

SEQ ID NO: 4153 - DNA, 84 bp, Artificial
  Barcode component
  misc_feature (33)..(34): n is a, c, g, or t
  misc_feature (43)..(44): n is a, c, g, or t
  misc_feature (53)..(54): n is a, c, g, or t
tttttttaagcagtggtatcaacgcagagtacnntcctaggtnnacagatggnntttttttttttttttttttttttttttttt

SEQ ID NO: 4154 - DNA, 84 bp, Artificial
  Barcode component
  misc_feature (33)..(34): n is a, c, g, or t
  misc_feature (43)..(44): n is a, c, g, or t
  misc_feature (53)..(54): n is a, c, g, or t
tttttttaagcagtggtatcaacgcagagtacnntcctaggtnnaggagtcanntttttttttttttttttttttttttttttt

SEQ ID NO: 4155 - DNA, 84 bp, Artificial
  Barcode component
  misc_feature (33)..(34): n is a, c, g, or t
  misc_feature (43)..(44): n is a, c, g, or t
  misc_feature (53)..(54): n is a, c, g, or t
tttttttaagcagtggtatcaacgcagagtacnntcctaggtnncgtgttacnntttttttttttttttttttttttttttttt

SEQ ID NO: 4156 - DNA, 84 bp, Artificial
  Barcode component
  misc_feature (33)..(34): n is a, c, g, or t
  misc_feature (43)..(44): n is a, c, g, or t
  misc_feature (53)..(54): n is a, c, g, or t
tttttttaagcagtggtatcaacgcagagtacnntcctaggtnntagtgtgcnntttttttttttttttttttttttttttttt

SEQ ID NO: 4157 - DNA, 84 bp, Artificial
  Barcode component
  misc_feature (33)..(34): n is a, c, g, or t
  misc_feature (43)..(44): n is a, c, g, or t
  misc_feature (53)..(54): n is a, c, g, or t
tttttttaagcagtggtatcaacgcagagtacnntcctaggtnnctcatgacnntttttttttttttttttttttttttttttt

SEQ ID NO: 4158 - DNA, 84 bp, Artificial
  Barcode component
  misc_feature (33)..(34): n is a, c, g, or t
  misc_feature (43)..(44): n is a, c, g, or t
  misc_feature (53)..(54): n is a, c, g, or t
tttttttaagcagtggtatcaacgcagagtacnntcctaggtnngtatccagnntttttttttttttttttttttttttttttt

SEQ ID NO: 4159 - DNA, 84 bp, Artificial
  Barcode component
  misc_feature (33)..(34): n is a, c, g, or t
  misc_feature (43)..(44): n is a, c, g, or t
  misc_feature (53)..(54): n is a, c, g, or t
tttttttaagcagtggtatcaacgcagagtacnntcctaggtnnacgcctatnntttttttttttttttttttttttttttttt

SEQ ID NO: 4160 - DNA, 84 bp, Artificial
  Barcode component
  misc_feature (33)..(34): n is a, c, g, or t
  misc_feature (43)..(44): n is a, c, g, or t
  misc_feature (53)..(54): n is a, c, g, or t
tttttttaagcagtggtatcaacgcagagtacnntcctaggtnnaacgacctnntttttttttttttttttttttttttttttt

SEQ ID NO: 4161 - DNA, 84 bp, Artificial
  Barcode component
  misc_feature (33)..(34): n is a, c, g, or t
  misc_feature (43)..(44): n is a, c, g, or t
  misc_feature (53)..(54): n is a, c, g, or t
tttttttaagcagtggtatcaacgcagagtacnntcctaggtnnatcaggctnntttttttttttttttttttttttttttttt

SEQ ID NO: 4162 - DNA, 84 bp, Artificial
  Barcode component
  misc_feature (33)..(34): n is a, c, g, or t
  misc_feature (43)..(44): n is a, c, g, or t
  misc_feature (53)..(54): n is a, c, g, or t
tttttttaagcagtggtatcaacgcagagtacnntcctaggtnncaagttcgnntttttttttttttttttttttttttttttt

SEQ ID NO: 4163 - DNA, 84 bp, Artificial
  Barcode component
  misc_feature (33)..(34): n is a, c, g, or t
  misc_feature (43)..(44): n is a, c, g, or t
  misc_feature (53)..(54): n is a, c, g, or t
tttttttaagcagtggtatcaacgcagagtacnntcctaggtnntagccaganntttttttttttttttttttttttttttttt

SEQ ID NO: 4164 - DNA, 84 bp, Artificial
  Barcode component
  misc_feature (33)..(34): n is a, c, g, or t
  misc_feature (43)..(44): n is a, c, g, or t
  misc_feature (53)..(54): n is a, c, g, or t
tttttttaagcagtggtatcaacgcagagtacnntcctaggtnncaatcacgnntttttttttttttttttttttttttttttt

SEQ ID NO: 4165 - DNA, 84 bp, Artificial
  Barcode component
  misc_feature (33)..(34): n is a, c, g, or t
  misc_feature (43)..(44): n is a, c, g, or t
  misc_feature (53)..(54): n is a, c, g, or t
tttttttaagcagtggtatcaacgcagagtacnntcctaggtnngcaacaagnntttttttttttttttttttttttttttttt

SEQ ID NO: 4166 - DNA, 84 bp, Artificial
  Barcode component
  misc_feature (33)..(34): n is a, c, g, or t
  misc_feature (43)..(44): n is a, c, g, or t
  misc_feature (53)..(54): n is a, c, g, or t
tttttttaagcagtggtatcaacgcagagtacnntcctaggtnncacgacaanntttttttttttttttttttttttttttttt

SEQ ID NO: 4167 - DNA, 84 bp, Artificial
  Barcode component
  misc_feature (33)..(34): n is a, c, g, or t
  misc_feature (43)..(44): n is a, c, g, or t
  misc_feature (53)..(54): n is a, c, g, or t
tttttttaagcagtggtatcaacgcagagtacnntcctaggtnntacggaganntttttttttttttttttttttttttttttt

SEQ ID NO: 4168 - DNA, 84 bp, Artificial
  Barcode component
  misc_feature (33)..(34): n is a, c, g, or t
  misc_feature (43)..(44): n is a, c, g, or t
  misc_feature (53)..(54): n is a, c, g, or t
tttttttaagcagtggtatcaacgcagagtacnntcctaggtnncgacaaganntttttttttttttttttttttttttttttt

SEQ ID NO: 4169 - DNA, 84 bp, Artificial
  Barcode component
  misc_feature (33)..(34): n is a, c, g, or t
  misc_feature (43)..(44): n is a, c, g, or t
  misc_feature (53)..(54): n is a, c, g, or t
tttttttaagcagtggtatcaacgcagagtacnntcctaggtnncgaagtganntttttttttttttttttttttttttttttt

SEQ ID NO: 4170 - DNA, 84 bp, Artificial
  Barcode component
  misc_feature (33)..(34): n is a, c, g, or t
  misc_feature (43)..(44): n is a, c, g, or t
  misc_feature (53)..(54): n is a, c, g, or t
tttttttaagcagtggtatcaacgcagagtacnntcctaggtnnagctggtanntttttttttttttttttttttttttttttt

SEQ ID NO: 4171 - DNA, 84 bp, Artificial
  Barcode component
  misc_feature (33)..(34): n is a, c, g, or t
  misc_feature (43)..(44): n is a, c, g, or t
  misc_feature (53)..(54): n is a, c, g, or t
tttttttaagcagtggtatcaacgcagagtacnntcctaggtnnaactaggcnntttttttttttttttttttttttttttttt

SEQ ID NO: 4172 - DNA, 84 bp, Artificial
  Barcode component
  misc_feature (33)..(34): n is a, c, g, or t
  misc_feature (43)..(44): n is a, c, g, or t
  misc_feature (53)..(54): n is a, c, g, or t
tttttttaagcagtggtatcaacgcagagtacnntcctaggtnncagcaagtnntttttttttttttttttttttttttttttt

SEQ ID NO: 4173 - DNA, 84 bp, Artificial
  Barcode component
  misc_feature (33)..(34): n is a, c, g, or t
  misc_feature (43)..(44): n is a, c, g, or t
  misc_feature (53)..(54): n is a, c, g, or t
tttttttaagcagtggtatcaacgcagagtacnntcctaggtnnacgaggtanntttttttttttttttttttttttttttttt

SEQ ID NO: 4174 - DNA, 84 bp, Artificial
  Barcode component
  misc_feature (33)..(34): n is a, c, g, or t
  misc_feature (43)..(44): n is a, c, g, or t
  misc_feature (53)..(54): n is a, c, g, or t
tttttttaagcagtggtatcaacgcagagtacnntcctaggtnncatcttccnntttttttttttttttttttttttttttttt

SEQ ID NO: 4175 - DNA, 84 bp, Artificial
  Barcode component
  misc_feature (33)..(34): n is a, c, g, or t
  misc_feature (43)..(44): n is a, c, g, or t
  misc_feature (53)..(54): n is a, c, g, or t
tttttttaagcagtggtatcaacgcagagtacnntcctaggtnncctgaatcnntttttttttttttttttttttttttttttt

SEQ ID NO: 4176 - DNA, 84 bp, Artificial
  Barcode component
  misc_feature (33)..(34): n is a, c, g, or t
  misc_feature (43)..(44): n is a, c, g, or t
  misc_feature (53)..(54): n is a, c, g, or t
tttttttaagcagtggtatcaacgcagagtacnntcctaggtnntgcagactnntttttttttttttttttttttttttttttt

SEQ ID NO: 4177 - DNA, 84 bp, Artificial
  Barcode component
  misc_feature (33)..(34): n is a, c, g, or t
  misc_feature (43)..(44): n is a, c, g, or t
  misc_feature (53)..(54): n is a, c, g, or t
tttttttaagcagtggtatcaacgcagagtacnntcctaggtnnagatgtggnntttttttttttttttttttttttttttttt

SEQ ID NO: 4178 - DNA, 84 bp, Artificial
  Barcode component
  misc_feature (33)..(34): n is a, c, g, or t
  misc_feature (43)..(44): n is a, c, g, or t
  misc_feature (53)..(54): n is a, c, g, or t
tttttttaagcagtggtatcaacgcagagtacnntcctaggtnnagttcgacnntttttttttttttttttttttttttttttt

SEQ ID NO: 4179 - DNA, 84 bp, Artificial
  Barcode component
  misc_feature (33)..(34): n is a, c, g, or t
  misc_feature (43)..(44): n is a, c, g, or t
  misc_feature (53)..(54): n is a, c, g, or t
tttttttaagcagtggtatcaacgcagagtacnntcctaggtnnacaacctcnntttttttttttttttttttttttttttttt

SEQ ID NO: 4180 - DNA, 84 bp, Artificial
  Barcode component
  misc_feature (33)..(34): n is a, c, g, or t
  misc_feature (43)..(44): n is a, c, g, or t
  misc_feature (53)..(54): n is a, c, g, or t
tttttttaagcagtggtatcaacgcagagtacnntcctaggtnncatggtagnntttttttttttttttttttttttttttttt

SEQ ID NO: 4181 - DNA, 84 bp, Artificial
  Barcode component
  misc_feature (33)..(34): n is a, c, g, or t
  misc_feature (43)..(44): n is a, c, g, or t
  misc_feature (53)..(54): n is a, c, g, or t
tttttttaagcagtggtatcaacgcagagtacnntcctaggtnncgtatctcnntttttttttttttttttttttttttttttt

SEQ ID NO: 4182 - DNA, 84 bp, Artificial
  Barcode component
  misc_feature (33)..(34): n is a, c, g, or t
  misc_feature (43)..(44): n is a, c, g, or t
  misc_feature (53)..(54): n is a, c, g, or t
tttttttaagcagtggtatcaacgcagagtacnntcctaggtnncctagttcnntttttttttttttttttttttttttttttt

SEQ ID NO: 4183 - DNA, 84 bp, Artificial
  Barcode component
  misc_feature (33)..(34): n is a, c, g, or t
  misc_feature (43)..(44): n is a, c, g, or t
  misc_feature (53)..(54): n is a, c, g, or t
tttttttaagcagtggtatcaacgcagagtacnntcctaggtnncaagagtcnntttttttttttttttttttttttttttttt

SEQ ID NO: 4184 - DNA, 84 bp, Artificial
  Barcode component
  misc_feature (33)..(34): n is a, c, g, or t
  misc_feature (43)..(44): n is a, c, g, or t
  misc_feature (53)..(54): n is a, c, g, or t
tttttttaagcagtggtatcaacgcagagtacnngatgacgannaatcggcanntttttttttttttttttttttttttttttt

SEQ ID NO: 4185 - DNA, 84 bp, Artificial
  Barcode component
  misc_feature (33)..(34): n is a, c, g, or t
  misc_feature (43)..(44): n is a, c, g, or t
  misc_feature (53)..(54): n is a, c, g, or t
tttttttaagcagtggtatcaacgcagagtacnngatgacganntacggcatnntttttttttttttttttttttttttttttt

SEQ ID NO: 4186 - DNA, 84 bp, Artificial
  Barcode component
  misc_feature (33)..(34): n is a, c, g, or t
  misc_feature (43)..(44): n is a, c, g, or t
  misc_feature (53)..(54): n is a, c, g, or t
tttttttaagcagtggtatcaacgcagagtacnngatgacgannttggatcgnntttttttttttttttttttttttttttttt

SEQ ID NO: 4187 - DNA, 84 bp, Artificial
  Barcode component
  misc_feature (33)..(34): n is a, c, g, or t
  misc_feature (43)..(44): n is a, c, g, or t
  misc_feature (53)..(54): n is a, c, g, or t
tttttttaagcagtggtatcaacgcagagtacnngatgacganntggaacganntttttttttttttttttttttttttttttt

SEQ ID NO: 4188 - DNA, 84 bp, Artificial
  Barcode component
  misc_feature (33)..(34): n is a, c, g, or t
  misc_feature (43)..(44): n is a, c, g, or t
  misc_feature (53)..(54): n is a, c, g, or t
tttttttaagcagtggtatcaacgcagagtacnngatgacgannggcaatcanntttttttttttttttttttttttttttttt

SEQ ID NO: 4189 - DNA, 84 bp, Artificial
  Barcode component
  misc_feature (33)..(34): n is a, c, g, or t
  misc_feature (43)..(44): n is a, c, g, or t
  misc_feature (53)..(54): n is a, c, g, or t
tttttttaagcagtggtatcaacgcagagtacnngatgacganngaatccganntttttttttttttttttttttttttttttt

SEQ ID NO: 4190 - DNA, 84 bp, Artificial
  Barcode component
  misc_feature (33)..(34): n is a, c, g, or t
  misc_feature (43)..(44): n is a, c, g, or t
  misc_feature (53)..(54): n is a, c, g, or t
tttttttaagcagtggtatcaacgcagagtacnngatgacgannttacggtgnntttttttttttttttttttttttttttttt

SEQ ID NO: 4191 - DNA, 84 bp, Artificial
  Barcode component
  misc_feature (33)..(34): n is a, c, g, or t
  misc_feature (43)..(44): n is a, c, g, or t
  misc_feature (53)..(54): n is a, c, g, or t
tttttttaagcagtggtatcaacgcagagtacnngatgacganncatatcggnntttttttttttttttttttttttttttttt

SEQ ID NO: 4192 - DNA, 84 bp, Artificial
  Barcode component
  misc_feature (33)..(34): n is a, c, g, or t
  misc_feature (43)..(44): n is a, c, g, or t
  misc_feature (53)..(54): n is a, c, g, or t
tttttttaagcagtggtatcaacgcagagtacnngatgacganncttcggtanntttttttttttttttttttttttttttttt

SEQ ID NO: 4193 - DNA, 84 bp, Artificial
  Barcode component
  misc_feature (33)..(34): n is a, c, g, or t
  misc_feature (43)..(44): n is a, c, g, or t
  misc_feature (53)..(54): n is a, c, g, or t
tttttttaagcagtggtatcaacgcagagtacnngatgacganntcctaacgnntttttttttttttttttttttttttttttt

SEQ ID NO: 4194 - DNA, 84 bp, Artificial
  Barcode component
  misc_feature (33)..(34): n is a, c, g, or t
  misc_feature (43)..(44): n is a, c, g, or t
  misc_feature (53)..(54): n is a, c, g, or t
tttttttaagcagtggtatcaacgcagagtacnngatgacganngtaagccanntttttttttttttttttttttttttttttt

SEQ ID NO: 4195 - DNA, 84 bp, Artificial
  Barcode component
  misc_feature (33)..(34): n is a, c, g, or t
  misc_feature (43)..(44): n is a, c, g, or t
  misc_feature (53)..(54): n is a, c, g, or t
tttttttaagcagtggtatcaacgcagagtacnngatgacganntaaggtggnntttttttttttttttttttttttttttttt

SEQ ID NO: 4196 - DNA, 84 bp, Artificial
  Barcode component
  misc_feature (33)..(34): n is a, c, g, or t
  misc_feature (43)..(44): n is a, c, g, or t
  misc_feature (53)..(54): n is a, c, g, or t
tttttttaagcagtggtatcaacgcagagtacnngatgacgannggtaagctnntttttttttttttttttttttttttttttt

SEQ ID NO: 4197 - DNA, 84 bp, Artificial
  Barcode component
  misc_feature (33)..(34): n is a, c, g, or t
  misc_feature (43)..(44): n is a, c, g, or t
  misc_feature (53)..(54): n is a, c, g, or t
tttttttaagcagtggtatcaacgcagagtacnngatgacganntgtgtcganntttttttttttttttttttttttttttttt

SEQ ID NO: 4198 - DNA, 84 bp, Artificial
  Barcode component
  misc_feature (33)..(34): n is a, c, g, or t
  misc_feature (43)..(44): n is a, c, g, or t
  misc_feature (53)..(54): n is a, c, g, or t
tttttttaagcagtggtatcaacgcagagtacnngatgacganngagcatganntttttttttttttttttttttttttttttt

SEQ ID NO: 4199 - DNA, 84 bp, Artificial
  Barcode component
  misc_feature (33)..(34): n is a, c, g, or t
  misc_feature (43)..(44): n is a, c, g, or t
  misc_feature (53)..(54): n is a, c, g, or t
tttttttaagcagtggtatcaacgcagagtacnngatgacganntcgaagtcnntttttttttttttttttttttttttttttt

SEQ ID NO: 4200 - DNA, 84 bp, Artificial
  Barcode component
  misc_feature (33)..(34): n is a, c, g, or t
  misc_feature (43)..(44): n is a, c, g, or t
  misc_feature (53)..(54): n is a, c, g, or t
tttttttaagcagtggtatcaacgcagagtacnngatgacgannggtgaacanntttttttttttttttttttttttttttttt

SEQ ID NO: 4201 - DNA, 84 bp, Artificial
  Barcode component
  misc_feature (33)..(34): n is a, c, g, or t
  misc_feature (43)..(44): n is a, c, g, or t
  misc_feature (53)..(54): n is a, c, g, or t
tttttttaagcagtggtatcaacgcagagtacnngatgacgannacatgcacnntttttttttttttttttttttttttttttt

SEQ ID NO: 4202 - DNA, 84 bp, Artificial
  Barcode component
  misc_feature (33)..(34): n is a, c, g, or t
  misc_feature (43)..(44): n is a, c, g, or t
  misc_feature (53)..(54): n is a, c, g, or t
tttttttaagcagtggtatcaacgcagagtacnngatgacgannccaacagtnntttttttttttttttttttttttttttttt

SEQ ID NO: 4203 - DNA, 84 bp, Artificial
  Barcode component
  misc_feature (33)..(34): n is a, c, g, or t
  misc_feature (43)..(44): n is a, c, g, or t
  misc_feature (53)..(54): n is a, c, g, or t
tttttttaagcagtggtatcaacgcagagtacnngatgacgannagaacagcnntttttttttttttttttttttttttttttt

SEQ ID NO: 4204 - DNA, 84 bp, Artificial
  Barcode component
  misc_feature (33)..(34): n is a, c, g, or t
  misc_feature (43)..(44): n is a, c, g, or t
  misc_feature (53)..(54): n is a, c, g, or t
tttttttaagcagtggtatcaacgcagagtacnngatgacganngaacacgtnntttttttttttttttttttttttttttttt

SEQ ID NO: 4205 - DNA, 84 bp, Artificial
  Barcode component
  misc_feature (33)..(34): n is a, c, g, or t
  misc_feature (43)..(44): n is a, c, g, or t
  misc_feature (53)..(54): n is a, c, g, or t
tttttttaagcagtggtatcaacgcagagtacnngatgacgannggtcttcanntttttttttttttttttttttttttttttt

SEQ ID NO: 4206 - DNA, 84 bp, Artificial
  Barcode component
  misc_feature (33)..(34): n is a, c, g, or t
  misc_feature (43)..(44): n is a, c, g, or t
  misc_feature (53)..(54): n is a, c, g, or t
tttttttaagcagtggtatcaacgcagagtacnngatgacgannaggttcagnntttttttttttttttttttttttttttttt

SEQ ID NO: 4207 - DNA, 84 bp, Artificial
  Barcode component
  misc_feature (33)..(34): n is a, c, g, or t
  misc_feature (43)..(44): n is a, c, g, or t
  misc_feature (53)..(54): n is a, c, g, or t
tttttttaagcagtggtatcaacgcagagtacnngatgacgannctagagcanntttttttttttttttttttttttttttttt

SEQ ID NO: 4208 - DNA, 84 bp, Artificial
  Barcode component
  misc_feature (33)..(34): n is a, c, g, or t
  misc_feature (43)..(44): n is a, c, g, or t
  misc_feature (53)..(54): n is a, c, g, or t
tttttttaagcagtggtatcaacgcagagtacnngatgacganncttctagcnntttttttttttttttttttttttttttttt

SEQ ID NO: 4209 - DNA, 84 bp, Artificial
  Barcode component
  misc_feature (33)..(34): n is a, c, g, or t
  misc_feature (43)..(44): n is a, c, g, or t
  misc_feature (53)..(54): n is a, c, g, or t
tttttttaagcagtggtatcaacgcagagtacnngatgacganngagtaacgnntttttttttttttttttttttttttttttt

SEQ ID NO: 4210 - DNA, 84 bp, Artificial
  Barcode component
  misc_feature (33)..(34): n is a, c, g, or t
  misc_feature (43)..(44): n is a, c, g, or t
  misc_feature (53)..(54): n is a, c, g, or t
tttttttaagcagtggtatcaacgcagagtacnngatgacgannctaagaggnntttttttttttttttttttttttttttttt

SEQ ID NO: 4211 - DNA, 84 bp, Artificial
  Barcode component
  misc_feature (33)..(34): n is a, c, g, or t
  misc_feature (43)..(44): n is a, c, g, or t
  misc_feature (53)..(54): n is a, c, g, or t
tttttttaagcagtggtatcaacgcagagtacnngatgacgannacgtgtagnntttttttttttttttttttttttttttttt

SEQ ID NO: 4212 - DNA, 84 bp, Artificial
  Barcode component
  misc_feature (33)..(34): n is a, c, g, or t
  misc_feature (43)..(44): n is a, c, g, or t
  misc_feature (53)..(54): n is a, c, g, or t
tttttttaagcagtggtatcaacgcagagtacnngatgacgannactacaggnntttttttttttttttttttttttttttttt

SEQ ID NO: 4213 - DNA, 84 bp, Artificial
  Barcode component
  misc_feature (33)..(34): n is a, c, g, or t
  misc_feature (43)..(44): n is a, c, g, or t
  misc_feature (53)..(54): n is a, c, g, or t
tttttttaagcagtggtatcaacgcagagtacnngatgacganntacaggtcnntttttttttttttttttttttttttttttt

SEQ ID NO: 4214 - DNA, 84 bp, Artificial
  Barcode component
  misc_feature (33)..(34): n is a, c, g, or t
  misc_feature (43)..(44): n is a, c, g, or t
  misc_feature (53)..(54): n is a, c, g, or t
tttttttaagcagtggtatcaacgcagagtacnngatgacgannctcacatgnntttttttttttttttttttttttttttttt

SEQ ID NO: 4215 - DNA, 84 bp, Artificial
  Barcode component
  misc_feature (33)..(34): n is a, c, g, or t
  misc_feature (43)..(44): n is a, c, g, or t
  misc_feature (53)..(54): n is a, c, g, or t
tttttttaagcagtggtatcaacgcagagtacnngatgacgannactaggagnntttttttttttttttttttttttttttttt

SEQ ID NO: 4216 - DNA, 84 bp, Artificial
  Barcode component
  misc_feature (33)..(34): n is a, c, g, or t
  misc_feature (43)..(44): n is a, c, g, or t
  misc_feature (53)..(54): n is a, c, g, or t
tttttttaagcagtggtatcaacgcagagtacnngatgacgannccatagganntttttttttttttttttttttttttttttt

SEQ ID NO: 4217 - DNA, 84 bp, Artificial
  Barcode component
  misc_feature (33)..(34): n is a, c, g, or t
  misc_feature (43)..(44): n is a, c, g, or t
  misc_feature (53)..(54): n is a, c, g, or t
tttttttaagcagtggtatcaacgcagagtacnngatgacgannggagaatcnntttttttttttttttttttttttttttttt

SEQ ID NO: 4218 - DNA, 84 bp, Artificial
  Barcode component
  misc_feature (33)..(34): n is a, c, g, or t
  misc_feature (43)..(44): n is a, c, g, or t
  misc_feature (53)..(54): n is a, c, g, or t
tttttttaagcagtggtatcaacgcagagtacnngatgacganngccaagaanntttttttttttttttttttttttttttttt

SEQ ID NO: 4219 - DNA, 84 bp, Artificial
  Barcode component
  misc_feature (33)..(34): n is a, c, g, or t
  misc_feature (43)..(44): n is a, c, g, or t
  misc_feature (53)..(54): n is a, c, g, or t
tttttttaagcagtggtatcaacgcagagtacnngatgacgannaaggcaagnntttttttttttttttttttttttttttttt

SEQ ID NO: 4220 - DNA, 84 bp, Artificial
  Barcode component
  misc_feature (33)..(34): n is a, c, g, or t
  misc_feature (43)..(44): n is a, c, g, or t
  misc_feature (53)..(54): n is a, c, g, or t
tttttttaagcagtggtatcaacgcagagtacnngatgacgannaatgtcgcnntttttttttttttttttttttttttttttt

SEQ ID NO: 4221 - DNA, 84 bp, Artificial
  Barcode component
  misc_feature (33)..(34): n is a, c, g, or t
  misc_feature (43)..(44): n is a, c, g, or t
  misc_feature (53)..(54): n is a, c, g, or t
tttttttaagcagtggtatcaacgcagagtacnngatgacgannatggaaccnntttttttttttttttttttttttttttttt

SEQ ID NO: 4222 - DNA, 84 bp, Artificial
  Barcode component
  misc_feature (33)..(34): n is a, c, g, or t
  misc_feature (43)..(44): n is a, c, g, or t
  misc_feature (53)..(54): n is a, c, g, or t
tttttttaagcagtggtatcaacgcagagtacnngatgacgannagaggcatnntttttttttttttttttttttttttttttt

SEQ ID NO: 4223 - DNA, 84 bp, Artificial
  Barcode component
  misc_feature (33)..(34): n is a, c, g, or t
  misc_feature (43)..(44): n is a, c, g, or t
  misc_feature (53)..(54): n is a, c, g, or t
tttttttaagcagtggtatcaacgcagagtacnngatgacganntgcatagcnntttttttttttttttttttttttttttttt

SEQ ID NO: 4224 - DNA, 84 bp, Artificial
  Barcode component
  misc_feature (33)..(34): n is a, c, g, or t
  misc_feature (43)..(44): n is a, c, g, or t
  misc_feature (53)..(54): n is a, c, g, or t
tttttttaagcagtggtatcaacgcagagtacnngatgacgannctaacgganntttttttttttttttttttttttttttttt

SEQ ID NO: 4225 - DNA, 84 bp, Artificial
  Barcode component
  misc_feature (33)..(34): n is a, c, g, or t
  misc_feature (43)..(44): n is a, c, g, or t
  misc_feature (53)..(54): n is a, c, g, or t
tttttttaagcagtggtatcaacgcagagtacnngatgacganntatcgaggnntttttttttttttttttttttttttttttt

SEQ ID NO: 4226 - DNA, 84 bp, Artificial
  Barcode component
  misc_feature (33)..(34): n is a, c, g, or t
  misc_feature (43)..(44): n is a, c, g, or t
  misc_feature (53)..(54): n is a, c, g, or t
tttttttaagcagtggtatcaacgcagagtacnngatgacganncatagcctnntttttttttttttttttttttttttttttt

SEQ ID NO: 4227 - DNA, 84 bp, Artificial
  Barcode component
  misc_feature (33)..(34): n is a, c, g, or t
  misc_feature (43)..(44): n is a, c, g, or t
  misc_feature (53)..(54): n is a, c, g, or t
tttttttaagcagtggtatcaacgcagagtacnngatgacgannatcgagacnntttttttttttttttttttttttttttttt

SEQ ID NO: 4228 - DNA, 84 bp, Artificial
  Barcode component
  misc_feature (33)..(34): n is a, c, g, or t
  misc_feature (43)..(44): n is a, c, g, or t
  misc_feature (53)..(54): n is a, c, g, or t
tttttttaagcagtggtatcaacgcagagtacnngatgacgannggaagagtnntttttttttttttttttttttttttttttt

SEQ ID NO: 4229 - DNA, 84 bp, Artificial
  Barcode component
  misc_feature (33)..(34): n is a, c, g, or t
  misc_feature (43)..(44): n is a, c, g, or t
  misc_feature (53)..(54): n is a, c, g, or t
tttttttaagcagtggtatcaacgcagagtacnngatgacgannccaagtagnntttttttttttttttttttttttttttttt

SEQ ID NO: 4230 - DNA, 84 bp, Artificial
  Barcode component
  misc_feature (33)..(34): n is a, c, g, or t
  misc_feature (43)..(44): n is a, c, g, or t
  misc_feature (53)..(54): n is a, c, g, or t
tttttttaagcagtggtatcaacgcagagtacnngatgacgannctgaacagnntttttttttttttttttttttttttttttt

SEQ ID NO: 4231 - DNA, 84 bp, Artificial
  Barcode component
  misc_feature (33)..(34): n is a, c, g, or t
  misc_feature (43)..(44): n is a, c, g, or t
  misc_feature (53)..(54): n is a, c, g, or t
tttttttaagcagtggtatcaacgcagagtacnngatgacganngtaggttcnntttttttttttttttttttttttttttttt

SEQ ID NO: 4232 - DNA, 84 bp, Artificial
  Barcode component
  misc_feature (33)..(34): n is a, c, g, or t
  misc_feature (43)..(44): n is a, c, g, or t
  misc_feature (53)..(54): n is a, c, g, or t
tttttttaagcagtggtatcaacgcagagtacnngatgacganngtatggacnntttttttttttttttttttttttttttttt

SEQ ID NO: 4233 - DNA, 84 bp, Artificial
  Barcode component
  misc_feature (33)..(34): n is a, c, g, or t
  misc_feature (43)..(44): n is a, c, g, or t
  misc_feature (53)..(54): n is a, c, g, or t
tttttttaagcagtggtatcaacgcagagtacnngatgacganntcgcaacanntttttttttttttttttttttttttttttt

SEQ ID NO: 4234 - DNA, 84 bp, Artificial
  Barcode component
  misc_feature (33)..(34): n is a, c, g, or t
  misc_feature (43)..(44): n is a, c, g, or t
  misc_feature (53)..(54): n is a, c, g, or t
tttttttaagcagtggtatcaacgcagagtacnngatgacgannccgctaatnntttttttttttttttttttttttttttttt

SEQ ID NO: 4235 - DNA, 84 bp, Artificial
  Barcode component
  misc_feature (33)..(34): n is a, c, g, or t
  misc_feature (43)..(44): n is a, c, g, or t
  misc_feature (53)..(54): n is a, c, g, or t
tttttttaagcagtggtatcaacgcagagtacnngatgacganngattcgcanntttttttttttttttttttttttttttttt

SEQ ID NO: 4236 - DNA, 84 bp, Artificial
  Barcode component
  misc_feature (33)..(34): n is a, c, g, or t
  misc_feature (43)..(44): n is a, c, g, or t
  misc_feature (53)..(54): n is a, c, g, or t
tttttttaagcagtggtatcaacgcagagtacnngatgacganncgatggaanntttttttttttttttttttttttttttttt

SEQ ID NO: 4237 - DNA, 84 bp, Artificial
  Barcode component
  misc_feature (33)..(34): n is a, c, g, or t
  misc_feature (43)..(44): n is a, c, g, or t
  misc_feature (53)..(54): n is a, c, g, or t
tttttttaagcagtggtatcaacgcagagtacnngatgacgannagcaagganntttttttttttttttttttttttttttttt

SEQ ID NO: 4238 - DNA, 84 bp, Artificial
  Barcode component
  misc_feature (33)..(34): n is a, c, g, or t
  misc_feature (43)..(44): n is a, c, g, or t
  misc_feature (53)..(54): n is a, c, g, or t
tttttttaagcagtggtatcaacgcagagtacnngatgacganncgtagcaanntttttttttttttttttttttttttttttt

SEQ ID NO: 4239 - DNA, 84 bp, Artificial
  Barcode component
  misc_feature (33)..(34): n is a, c, g, or t
  misc_feature (43)..(44): n is a, c, g, or t
  misc_feature (53)..(54): n is a, c, g, or t
tttttttaagcagtggtatcaacgcagagtacnngatgacganntggcagtanntttttttttttttttttttttttttttttt

SEQ ID NO: 4240 - DNA, 84 bp, Artificial
  Barcode component
  misc_feature (33)..(34): n is a, c, g, or t
  misc_feature (43)..(44): n is a, c, g, or t
  misc_feature (53)..(54): n is a, c, g, or t
tttttttaagcagtggtatcaacgcagagtacnngatgacganncggtagttnntttttttttttttttttttttttttttttt

SEQ ID NO: 4241 - DNA, 84 bp, Artificial
  Barcode component
  misc_feature (33)..(34): n is a, c, g, or t
  misc_feature (43)..(44): n is a, c, g, or t
  misc_feature (53)..(54): n is a, c, g, or t
tttttttaagcagtggtatcaacgcagagtacnngatgacganntgacttcgnntttttttttttttttttttttttttttttt

SEQ ID NO: 4242 - DNA, 84 bp, Artificial
  Barcode component
  misc_feature (33)..(34): n is a, c, g, or t
  misc_feature (43)..(44): n is a, c, g, or t
  misc_feature (53)..(54): n is a, c, g, or t
tttttttaagcagtggtatcaacgcagagtacnngatgacganngagtgcaanntttttttttttttttttttttttttttttt

SEQ ID NO: 4243 - DNA, 84 bp, Artificial
  Barcode component
  misc_feature (33)..(34): n is a, c, g, or t
  misc_feature (43)..(44): n is a, c, g, or t
  misc_feature (53)..(54): n is a, c, g, or t
tttttttaagcagtggtatcaacgcagagtacnngatgacgannacggtaacnntttttttttttttttttttttttttttttt

SEQ ID NO: 4244 - DNA, 84 bp, Artificial
  Barcode component
  misc_feature (33)..(34): n is a, c, g, or t
  misc_feature (43)..(44): n is a, c, g, or t
  misc_feature (53)..(54): n is a, c, g, or t
tttttttaagcagtggtatcaacgcagagtacnngatgacgannaagtggtgnntttttttttttttttttttttttttttttt

SEQ ID NO: 4245 - DNA, 84 bp, Artificial
  Barcode component
  misc_feature (33)..(34): n is a, c, g, or t
  misc_feature (43)..(44): n is a, c, g, or t
  misc_feature (53)..(54): n is a, c, g, or t
tttttttaagcagtggtatcaacgcagagtacnngatgacgannggagacaanntttttttttttttttttttttttttttttt

SEQ ID NO: 4246 - DNA, 84 bp, Artificial
  Barcode component
  misc_feature (33)..(34): n is a, c, g, or t
  misc_feature (43)..(44): n is a, c, g, or t
  misc_feature (53)..(54): n is a, c, g, or t
tttttttaagcagtggtatcaacgcagagtacnngatgacganntcaaggacnntttttttttttttttttttttttttttttt

SEQ ID NO: 4247 - DNA, 84 bp, Artificial
  Barcode component
  misc_feature (33)..(34): n is a, c, g, or t
  misc_feature (43)..(44): n is a, c, g, or t
  misc_feature (53)..(54): n is a, c, g, or t
tttttttaagcagtggtatcaacgcagagtacnngatgacgannaagagagcnntttttttttttttttttttttttttttttt

SEQ ID NO: 4248 - DNA, 84 bp, Artificial
  Barcode component
  misc_feature (33)..(34): n is a, c, g, or t
  misc_feature (43)..(44): n is a, c, g, or t
  misc_feature (53)..(54): n is a, c, g, or t
tttttttaagcagtggtatcaacgcagagtacnngatgacganncgagagatnntttttttttttttttttttttttttttttt

SEQ ID NO: 4249 - DNA, 84 bp, Artificial
  Barcode component
  misc_feature (33)..(34): n is a, c, g, or t
  misc_feature (43)..(44): n is a, c, g, or t
  misc_feature (53)..(54): n is a, c, g, or t
tttttttaagcagtggtatcaacgcagagtacnngatgacgannacagatggnntttttttttttttttttttttttttttttt

SEQ ID NO: 4250 - DNA, 84 bp, Artificial
  Barcode component
  misc_feature (33)..(34): n is a, c, g, or t
  misc_feature (43)..(44): n is a, c, g, or t
  misc_feature (53)..(54): n is a, c, g, or t
tttttttaagcagtggtatcaacgcagagtacnngatgacgannaggagtcanntttttttttttttttttttttttttttttt

SEQ ID NO: 4251 - DNA, 84 bp, Artificial
  Barcode component
  misc_feature (33)..(34): n is a, c, g, or t
  misc_feature (43)..(44): n is a, c, g, or t
  misc_feature (53)..(54): n is a, c, g, or t
tttttttaagcagtggtatcaacgcagagtacnngatgacganncgtgttacnntttttttttttttttttttttttttttttt

SEQ ID NO: 4252 - DNA, 84 bp, Artificial
  Barcode component
  misc_feature (33)..(34): n is a, c, g, or t
  misc_feature (43)..(44): n is a, c, g, or t
  misc_feature (53)..(54): n is a, c, g, or t
tttttttaagcagtggtatcaacgcagagtacnngatgacganntagtgtgcnntttttttttttttttttttttttttttttt

SEQ ID NO: 4253 - DNA, 84 bp, Artificial
  Barcode component
  misc_feature (33)..(34): n is a, c, g, or t
  misc_feature (43)..(44): n is a, c, g, or t
  misc_feature (53)..(54): n is a, c, g, or t
tttttttaagcagtggtatcaacgcagagtacnngatgacgannctcatgacnntttttttttttttttttttttttttttttt

SEQ ID NO: 4254 - DNA, 84 bp, Artificial
  Barcode component
  misc_feature (33)..(34): n is a, c, g, or t
  misc_feature (43)..(44): n is a, c, g, or t
  misc_feature (53)..(54): n is a, c, g, or t
tttttttaagcagtggtatcaacgcagagtacnngatgacganngtatccagnntttttttttttttttttttttttttttttt

SEQ ID NO: 4255 - DNA, 84 bp, Artificial
  Barcode component
  misc_feature (33)..(34): n is a, c, g, or t
  misc_feature (43)..(44): n is a, c, g, or t
  misc_feature (53)..(54): n is a, c, g, or t
tttttttaagcagtggtatcaacgcagagtacnngatgacgannacgcctatnntttttttttttttttttttttttttttttt

SEQ ID NO: 4256 - DNA, 84 bp, Artificial
  Barcode component
  misc_feature (33)..(34): n is a, c, g, or t
  misc_feature (43)..(44): n is a, c, g, or t
  misc_feature (53)..(54): n is a, c, g, or t
tttttttaagcagtggtatcaacgcagagtacnngatgacgannaacgacctnntttttttttttttttttttttttttttttt

SEQ ID NO: 4257 - DNA, 84 bp, Artificial
  Barcode component
  misc_feature (33)..(34): n is a, c, g, or t
  misc_feature (43)..(44): n is a, c, g, or t
  misc_feature (53)..(54): n is a, c, g, or t
tttttttaagcagtggtatcaacgcagagtacnngatgacgannatcaggctnntttttttttttttttttttttttttttttt

SEQ ID NO: 4258 - DNA, 84 bp, Artificial
  Barcode component
  misc_feature (33)..(34): n is a, c, g, or t
  misc_feature (43)..(44): n is a, c, g, or t
  misc_feature (53)..(54): n is a, c, g, or t
tttttttaagcagtggtatcaacgcagagtacnngatgacganncaagttcgnntttttttttttttttttttttttttttttt

SEQ ID NO: 4259 - DNA, 84 bp, Artificial
  Barcode component
  misc_feature (33)..(34): n is a, c, g, or t
  misc_feature (43)..(44): n is a, c, g, or t
  misc_feature (53)..(54): n is a, c, g, or t
tttttttaagcagtggtatcaacgcagagtacnngatgacganntagccaganntttttttttttttttttttttttttttttt

SEQ ID NO: 4260 - DNA, 84 bp, Artificial
  Barcode component
  misc_feature (33)..(34): n is a, c, g, or t
  misc_feature (43)..(44): n is a, c, g, or t
  misc_feature (53)..(54): n is a, c, g, or t
tttttttaagcagtggtatcaacgcagagtacnngatgacganncaatcacgnntttttttttttttttttttttttttttttt

SEQ ID NO: 4261 - DNA, 84 bp, Artificial
  Barcode component
  misc_feature (33)..(34): n is a, c, g, or t
  misc_feature (43)..(44): n is a, c, g, or t
  misc_feature (53)..(54): n is a, c, g, or t
tttttttaagcagtggtatcaacgcagagtacnngatgacganngcaacaagnntttttttttttttttttttttttttttttt

SEQ ID NO: 4262 - DNA, 84 bp, Artificial
  Barcode component
  misc_feature (33)..(34): n is a, c, g, or t
  misc_feature (43)..(44): n is a, c, g, or t
  misc_feature (53)..(54): n is a, c, g, or t
tttttttaagcagtggtatcaacgcagagtacnngatgacganncacgacaanntttttttttttttttttttttttttttttt

SEQ ID NO: 4263 - DNA, 84 bp, Artificial
  Barcode component
  misc_feature (33)..(34): n is a, c, g, or t
  misc_feature (43)..(44): n is a, c, g, or t
  misc_feature (53)..(54): n is a, c, g, or t
tttttttaagcagtggtatcaacgcagagtacnngatgacganntacggaganntttttttttttttttttttttttttttttt

SEQ ID NO: 4264 - DNA, 84 bp, Artificial
  Barcode component
  misc_feature (33)..(34): n is a, c, g, or t
  misc_feature (43)..(44): n is a, c, g, or t
  misc_feature (53)..(54): n is a, c, g, or t
tttttttaagcagtggtatcaacgcagagtacnngatgacganncgacaaganntttttttttttttttttttttttttttttt

SEQ ID NO: 4265 - DNA, 84 bp, Artificial
  Barcode component
  misc_feature (33)..(34): n is a, c, g, or t
  misc_feature (43)..(44): n is a, c, g, or t
  misc_feature (53)..(54): n is a, c, g, or t
tttttttaagcagtggtatcaacgcagagtacnngatgacganncgaagtganntttttttttttttttttttttttttttttt

SEQ ID NO: 4266 - DNA, 84 bp, Artificial
  Barcode component
  misc_feature (33)..(34): n is a, c, g, or t
  misc_feature (43)..(44): n is a, c, g, or t
  misc_feature (53)..(54): n is a, c, g, or t
tttttttaagcagtggtatcaacgcagagtacnngatgacgannagctggtanntttttttttttttttttttttttttttttt

SEQ ID NO: 4267 - DNA, 84 bp, Artificial
  Barcode component
  misc_feature (33)..(34): n is a, c, g, or t
  misc_feature (43)..(44): n is a, c, g, or t
  misc_feature (53)..(54): n is a, c, g, or t
tttttttaagcagtggtatcaacgcagagtacnngatgacgannaactaggcnntttttttttttttttttttttttttttttt

SEQ ID NO: 4268 - DNA, 84 bp, Artificial
  Barcode component
  misc_feature (33)..(34): n is a, c, g, or t
  misc_feature (43)..(44): n is a, c, g, or t
  misc_feature (53)..(54): n is a, c, g, or t
tttttttaagcagtggtatcaacgcagagtacnngatgacganncagcaagtnntttttttttttttttttttttttttttttt

SEQ ID NO: 4269 - DNA, 84 bp, Artificial
  Barcode component
  misc_feature (33)..(34): n is a, c, g, or t
  misc_feature (43)..(44): n is a, c, g, or t
  misc_feature (53)..(54): n is a, c, g, or t
tttttttaagcagtggtatcaacgcagagtacnngatgacgannacgaggtanntttttttttttttttttttttttttttttt

SEQ ID NO: 4270 - DNA, 84 bp, Artificial
  Barcode component
  misc_feature (33)..(34): n is a, c, g, or t
  misc_feature (43)..(44): n is a, c, g, or t
  misc_feature (53)..(54): n is a, c, g, or t
tttttttaagcagtggtatcaacgcagagtacnngatgacganncatcttccnntttttttttttttttttttttttttttttt

SEQ ID NO: 4271 - DNA, 84 bp, Artificial
  Barcode component
  misc_feature (33)..(34): n is a, c, g, or t
  misc_feature (43)..(44): n is a, c, g, or t
  misc_feature (53)..(54): n is a, c, g, or t
tttttttaagcagtggtatcaacgcagagtacnngatgacganncctgaatcnntttttttttttttttttttttttttttttt

SEQ ID NO: 4272 - DNA, 84 bp, Artificial
  Barcode component
  misc_feature (33)..(34): n is a, c, g, or t
  misc_feature (43)..(44): n is a, c, g, or t
  misc_feature (53)..(54): n is a, c, g, or t
tttttttaagcagtggtatcaacgcagagtacnngatgacganntgcagactnntttttttttttttttttttttttttttttt

SEQ ID NO: 4273 - DNA, 84 bp, Artificial
  Barcode component
  misc_feature (33)..(34): n is a, c, g, or t
  misc_feature (43)..(44): n is a, c, g, or t
  misc_feature (53)..(54): n is a, c, g, or t
tttttttaagcagtggtatcaacgcagagtacnngatgacgannagatgtggnntttttttttttttttttttttttttttttt

SEQ ID NO: 4274 - DNA, 84 bp, Artificial
  Barcode component
  misc_feature (33)..(34): n is a, c, g, or t
  misc_feature (43)..(44): n is a, c, g, or t
  misc_feature (53)..(54): n is a, c, g, or t
tttttttaagcagtggtatcaacgcagagtacnngatgacgannagttcgacnntttttttttttttttttttttttttttttt

SEQ ID NO: 4275 - DNA, 84 bp, Artificial
  Barcode component
  misc_feature (33)..(34): n is a, c, g, or t
  misc_feature (43)..(44): n is a, c, g, or t
  misc_feature (53)..(54): n is a, c, g, or t
tttttttaagcagtggtatcaacgcagagtacnngatgacgannacaacctcnntttttttttttttttttttttttttttttt

SEQ ID NO: 4276 - DNA, 84 bp, Artificial
  Barcode component
  misc_feature (33)..(34): n is a, c, g, or t
  misc_feature (43)..(44): n is a, c, g, or t
  misc_feature (53)..(54): n is a, c, g, or t
tttttttaagcagtggtatcaacgcagagtacnngatgacganncatggtagnntttttttttttttttttttttttttttttt

SEQ ID NO: 4277 - DNA, 84 bp, Artificial
  Barcode component
  misc_feature (33)..(34): n is a, c, g, or t
  misc_feature (43)..(44): n is a, c, g, or t
  misc_feature (53)..(54): n is a, c, g, or t
tttttttaagcagtggtatcaacgcagagtacnngatgacganncgtatctcnntttttttttttttttttttttttttttttt

SEQ ID NO: 4278 - DNA, 84 bp, Artificial
  Barcode component
  misc_feature (33)..(34): n is a, c, g, or t
  misc_feature (43)..(44): n is a, c, g, or t
  misc_feature (53)..(54): n is a, c, g, or t
tttttttaagcagtggtatcaacgcagagtacnngatgacganncctagttcnntttttttttttttttttttttttttttttt

SEQ ID NO: 4279 - DNA, 84 bp, Artificial
  Barcode component
  misc_feature (33)..(34): n is a, c, g, or t
  misc_feature (43)..(44): n is a, c, g, or t
  misc_feature (53)..(54): n is a, c, g, or t
tttttttaagcagtggtatcaacgcagagtacnngatgacganncaagagtcnntttttttttttttttttttttttttttttt

SEQ ID NO: 4280 - DNA, 84 bp, Artificial
  Barcode component
  misc_feature (33)..(34): n is a, c, g, or t
  misc_feature (43)..(44): n is a, c, g, or t
  misc_feature (53)..(54): n is a, c, g, or t
tttttttaagcagtggtatcaacgcagagtacnnatgtcgagnnaatcggcanntttttttttttttttttttttttttttttt

SEQ ID NO: 4281 - DNA, 84 bp, Artificial
  Barcode component
  misc_feature (33)..(34): n is a, c, g, or t
  misc_feature (43)..(44): n is a, c, g, or t
  misc_feature (53)..(54): n is a, c, g, or t
tttttttaagcagtggtatcaacgcagagtacnnatgtcgagnntacggcatnntttttttttttttttttttttttttttttt

SEQ ID NO: 4282 - DNA, 84 bp, Artificial
  Barcode component
  misc_feature (33)..(34): n is a, c, g, or t
  misc_feature (43)..(44): n is a, c, g, or t
  misc_feature (53)..(54): n is a, c, g, or t
tttttttaagcagtggtatcaacgcagagtacnnatgtcgagnnttggatcgnntttttttttttttttttttttttttttttt

SEQ ID NO: 4283 - DNA, 84 bp, Artificial
  Barcode component
  misc_feature (33)..(34): n is a, c, g, or t
  misc_feature (43)..(44): n is a, c, g, or t
  misc_feature (53)..(54): n is a, c, g, or t
tttttttaagcagtggtatcaacgcagagtacnnatgtcgagnntggaacganntttttttttttttttttttttttttttttt

SEQ ID NO: 4284 - DNA, 84 bp, Artificial
  Barcode component
  misc_feature (33)..(34): n is a, c, g, or t
  misc_feature (43)..(44): n is a, c, g, or t
  misc_feature (53)..(54): n is a, c, g, or t
tttttttaagcagtggtatcaacgcagagtacnnatgtcgagnnggcaatcanntttttttttttttttttttttttttttttt

SEQ ID NO: 4285 - DNA, 84 bp, Artificial
  Barcode component
  misc_feature (33)..(34): n is a, c, g, or t
  misc_feature (43)..(44): n is a, c, g, or t
  misc_feature (53)..(54): n is a, c, g, or t
tttttttaagcagtggtatcaacgcagagtacnnatgtcgagnngaatccganntttttttttttttttttttttttttttttt

SEQ ID NO: 4286 - DNA, 84 bp, Artificial
  Barcode component
  misc_feature (33)..(34): n is a, c, g, or t
  misc_feature (43)..(44): n is a, c, g, or t
  misc_feature (53)..(54): n is a, c, g, or t
tttttttaagcagtggtatcaacgcagagtacnnatgtcgagnnttacggtgnntttttttttttttttttttttttttttttt

SEQ ID NO: 4287 - DNA, 84 bp, Artificial
  Barcode component
  misc_feature (33)..(34): n is a, c, g, or t
  misc_feature (43)..(44): n is a, c, g, or t
  misc_feature (53)..(54): n is a, c, g, or t
tttttttaagcagtggtatcaacgcagagtacnnatgtcgagnncatatcggnntttttttttttttttttttttttttttttt

SEQ ID NO: 4288 - DNA, 84 bp, Artificial
  Barcode component
  misc_feature (33)..(34): n is a, c, g, or t
  misc_feature (43)..(44): n is a, c, g, or t
  misc_feature (53)..(54): n is a, c, g, or t
tttttttaagcagtggtatcaacgcagagtacnnatgtcgagnncttcggtanntttttttttttttttttttttttttttttt

SEQ ID NO: 4289 - DNA, 84 bp, Artificial
  Barcode component
  misc_feature (33)..(34): n is a, c, g, or t
  misc_feature (43)..(44): n is a, c, g, or t
  misc_feature (53)..(54): n is a, c, g, or t
tttttttaagcagtggtatcaacgcagagtacnnatgtcgagnntcctaacgnntttttttttttttttttttttttttttttt

SEQ ID NO: 4290 - DNA, 84 bp, Artificial
  Barcode component
  misc_feature (33)..(34): n is a, c, g, or t
  misc_feature (43)..(44): n is a, c, g, or t
  misc_feature (53)..(54): n is a, c, g, or t
tttttttaagcagtggtatcaacgcagagtacnnatgtcgagnngtaagccanntttttttttttttttttttttttttttttt

SEQ ID NO: 4291 - DNA, 84 bp, Artificial
  Barcode component
  misc_feature (33)..(34): n is a, c, g, or t
  misc_feature (43)..(44): n is a, c, g, or t
  misc_feature (53)..(54): n is a, c, g, or t
tttttttaagcagtggtatcaacgcagagtacnnatgtcgagnntaaggtggnntttttttttttttttttttttttttttttt

SEQ ID NO: 4292 - DNA, 84 bp, Artificial
  Barcode component
  misc_feature (33)..(34): n is a, c, g, or t
  misc_feature (43)..(44): n is a, c, g, or t
  misc_feature (53)..(54): n is a, c, g, or t
tttttttaagcagtggtatcaacgcagagtacnnatgtcgagnnggtaagctnntttttttttttttttttttttttttttttt

SEQ ID NO: 4293 - DNA, 84 bp, Artificial
  Barcode component
  misc_feature (33)..(34): n is a, c, g, or t
  misc_feature (43)..(44): n is a, c, g, or t
  misc_feature (53)..(54): n is a, c, g, or t
tttttttaagcagtggtatcaacgcagagtacnnatgtcgagnntgtgtcganntttttttttttttttttttttttttttttt

SEQ ID NO: 4294 - DNA, 84 bp, Artificial
  Barcode component
  misc_feature (33)..(34): n is a, c, g, or t
  misc_feature (43)..(44): n is a, c, g, or t
  misc_feature (53)..(54): n is a, c, g, or t
tttttttaagcagtggtatcaacgcagagtacnnatgtcgagnngagcatganntttttttttttttttttttttttttttttt

SEQ ID NO: 4295 - DNA, 84 bp, Artificial
  Barcode component
  misc_feature (33)..(34): n is a, c, g, or t
  misc_feature (43)..(44): n is a, c, g, or t
  misc_feature (53)..(54): n is a, c, g, or t
tttttttaagcagtggtatcaacgcagagtacnnatgtcgagnntcgaagtcnntttttttttttttttttttttttttttttt

SEQ ID NO: 4296 - DNA, 84 bp, Artificial
  Barcode component
  misc_feature (33)..(34): n is a, c, g, or t
  misc_feature (43)..(44): n is a, c, g, or t
  misc_feature (53)..(54): n is a, c, g, or t
tttttttaagcagtggtatcaacgcagagtacnnatgtcgagnnggtgaacanntttttttttttttttttttttttttttttt

SEQ ID NO: 4297 - DNA, 84 bp, Artificial
  Barcode component
  misc_feature (33)..(34): n is a, c, g, or t
  misc_feature (43)..(44): n is a, c, g, or t
  misc_feature (53)..(54): n is a, c, g, or t
tttttttaagcagtggtatcaacgcagagtacnnatgtcgagnnacatgcacnntttttttttttttttttttttttttttttt

SEQ ID NO: 4298 - DNA, 84 bp, Artificial
  Barcode component
  misc_feature (33)..(34): n is a, c, g, or t
  misc_feature (43)..(44): n is a, c, g, or t
  misc_feature (53)..(54): n is a, c, g, or t
tttttttaagcagtggtatcaacgcagagtacnnatgtcgagnnccaacagtnntttttttttttttttttttttttttttttt

SEQ ID NO: 4299 - DNA, 84 bp, Artificial
  Barcode component
  misc_feature (33)..(34): n is a, c, g, or t
  misc_feature (43)..(44): n is a, c, g, or t
  misc_feature (53)..(54): n is a, c, g, or t
tttttttaagcagtggtatcaacgcagagtacnnatgtcgagnnagaacagcnntttttttttttttttttttttttttttttt

SEQ ID NO: 4300 - DNA, 84 bp, Artificial
  Barcode component
  misc_feature (33)..(34): n is a, c, g, or t
  misc_feature (43)..(44): n is a, c, g, or t
  misc_feature (53)..(54): n is a, c, g, or t
tttttttaagcagtggtatcaacgcagagtacnnatgtcgagnngaacacgtnntttttttttttttttttttttttttttttt

SEQ ID NO: 4301 - DNA, 84 bp, Artificial
  Barcode component
  misc_feature (33)..(34): n is a, c, g, or t
  misc_feature (43)..(44): n is a, c, g, or t
  misc_feature (53)..(54): n is a, c, g, or t
tttttttaagcagtggtatcaacgcagagtacnnatgtcgagnnggtcttcanntttttttttttttttttttttttttttttt

SEQ ID NO: 4302 - DNA, 84 bp, Artificial
  Barcode component
  misc_feature (33)..(34): n is a, c, g, or t
  misc_feature (43)..(44): n is a, c, g, or t
  misc_feature (53)..(54): n is a, c, g, or t
tttttttaagcagtggtatcaacgcagagtacnnatgtcgagnnaggttcagnntttttttttttttttttttttttttttttt

SEQ ID NO: 4303 - DNA, 84 bp, Artificial
  Barcode component
  misc_feature (33)..(34): n is a, c, g, or t
  misc_feature (43)..(44): n is a, c, g, or t
  misc_feature (53)..(54): n is a, c, g, or t
tttttttaagcagtggtatcaacgcagagtacnnatgtcgagnnctagagcanntttttttttttttttttttttttttttttt

SEQ ID NO: 4304 - DNA, 84 bp, Artificial
  Barcode component
  misc_feature (33)..(34): n is a, c, g, or t
  misc_feature (43)..(44): n is a, c, g, or t
  misc_feature (53)..(54): n is a, c, g, or t
tttttttaagcagtggtatcaacgcagagtacnnatgtcgagnncttctagcnntttttttttttttttttttttttttttttt

SEQ ID NO: 4305 - DNA, 84 bp, Artificial
  Barcode component
  misc_feature (33)..(34): n is a, c, g, or t
  misc_feature (43)..(44): n is a, c, g, or t
  misc_feature (53)..(54): n is a, c, g, or t
tttttttaagcagtggtatcaacgcagagtacnnatgtcgagnngagtaacgnntttttttttttttttttttttttttttttt

SEQ ID NO: 4306 - DNA, 84 bp, Artificial
  Barcode component
  misc_feature (33)..(34): n is a, c, g, or t
  misc_feature (43)..(44): n is a, c, g, or t
  misc_feature (53)..(54): n is a, c, g, or t
tttttttaagcagtggtatcaacgcagagtacnnatgtcgagnnctaagaggnntttttttttttttttttttttttttttttt

SEQ ID NO: 4307 - DNA, 84 bp, Artificial
  Barcode component
  misc_feature (33)..(34): n is a, c, g, or t
  misc_feature (43)..(44): n is a, c, g, or t
  misc_feature (53)..(54): n is a, c, g, or t
tttttttaagcagtggtatcaacgcagagtacnnatgtcgagnnacgtgtagnntttttttttttttttttttttttttttttt

SEQ ID NO: 4308 - DNA, 84 bp, Artificial
  Barcode component
  misc_feature (33)..(34): n is a, c, g, or t
  misc_feature (43)..(44): n is a, c, g, or t
  misc_feature (53)..(54): n is a, c, g, or t
tttttttaagcagtggtatcaacgcagagtacnnatgtcgagnnactacaggnntttttttttttttttttttttttttttttt

SEQ ID NO: 4309 - DNA, 84 bp, Artificial
  Barcode component
  misc_feature (33)..(34): n is a, c, g, or t
  misc_feature (43)..(44): n is a, c, g, or t
  misc_feature (53)..(54): n is a, c, g, or t
tttttttaagcagtggtatcaacgcagagtacnnatgtcgagnntacaggtcnntttttttttttttttttttttttttttttt

SEQ ID NO: 4310 - DNA, 84 bp, Artificial
  Barcode component
  misc_feature (33)..(34): n is a, c, g, or t
  misc_feature (43)..(44): n is a, c, g, or t
  misc_feature (53)..(54): n is a, c, g, or t
tttttttaagcagtggtatcaacgcagagtacnnatgtcgagnnctcacatgnntttttttttttttttttttttttttttttt

SEQ ID NO: 4311 - DNA, 84 bp, Artificial
  Barcode component
  misc_feature (33)..(34): n is a, c, g, or t
  misc_feature (43)..(44): n is a, c, g, or t
  misc_feature (53)..(54): n is a, c, g, or t
tttttttaagcagtggtatcaacgcagagtacnnatgtcgagnnactaggagnntttttttttttttttttttttttttttttt

SEQ ID NO: 4312 - DNA, 84 bp, Artificial
  Barcode component
  misc_feature (33)..(34): n is a, c, g, or t
  misc_feature (43)..(44): n is a, c, g, or t
  misc_feature (53)..(54): n is a, c, g, or t
tttttttaagcagtggtatcaacgcagagtacnnatgtcgagnnccatagganntttttttttttttttttttttttttttttt

SEQ ID NO: 4313 - DNA, 84 bp, Artificial
  Barcode component
  misc_feature (33)..(34): n is a, c, g, or t
  misc_feature (43)..(44): n is a, c, g, or t
  misc_feature (53)..(54): n is a, c, g, or t
tttttttaagcagtggtatcaacgcagagtacnnatgtcgagnnggagaatcnntttttttttttttttttttttttttttttt

SEQ ID NO: 4314 - DNA, 84 bp, Artificial
  Barcode component
  misc_feature (33)..(34): n is a, c, g, or t
  misc_feature (43)..(44): n is a, c, g, or t
  misc_feature (53)..(54): n is a, c, g, or t
tttttttaagcagtggtatcaacgcagagtacnnatgtcgagnngccaagaanntttttttttttttttttttttttttttttt

SEQ ID NO: 4315 - DNA, 84 bp, Artificial
  Barcode component
  misc_feature (33)..(34): n is a, c, g, or t
  misc_feature (43)..(44): n is a, c, g, or t
  misc_feature (53)..(54): n is a, c, g, or t
tttttttaagcagtggtatcaacgcagagtacnnatgtcgagnnaaggcaagnntttttttttttttttttttttttttttttt

SEQ ID NO: 4316 - DNA, 84 bp, Artificial
  Barcode component
  misc_feature (33)..(34): n is a, c, g, or t
  misc_feature (43)..(44): n is a, c, g, or t
  misc_feature (53)..(54): n is a, c, g, or t
tttttttaagcagtggtatcaacgcagagtacnnatgtcgagnnaatgtcgcnntttttttttttttttttttttttttttttt

SEQ ID NO: 4317 - DNA, 84 bp, Artificial
  Barcode component
  misc_feature (33)..(34): n is a, c, g, or t
  misc_feature (43)..(44): n is a, c, g, or t
  misc_feature (53)..(54): n is a, c, g, or t
tttttttaagcagtggtatcaacgcagagtacnnatgtcgagnnatggaaccnntttttttttttttttttttttttttttttt

SEQ ID NO: 4318 - DNA, 84 bp, Artificial
  Barcode component
  misc_feature (33)..(34): n is a, c, g, or t
  misc_feature (43)..(44): n is a, c, g, or t
  misc_feature (53)..(54): n is a, c, g, or t
tttttttaagcagtggtatcaacgcagagtacnnatgtcgagnnagaggcatnntttttttttttttttttttttttttttttt

SEQ ID NO: 4319 - DNA, 84 bp, Artificial
  Barcode component
  misc_feature (33)..(34): n is a, c, g, or t
  misc_feature (43)..(44): n is a, c, g, or t
  misc_feature (53)..(54): n is a, c, g, or t
tttttttaagcagtggtatcaacgcagagtacnnatgtcgagnntgcatagcnntttttttttttttttttttttttttttttt

SEQ ID NO: 4320 - DNA, 84 bp, Artificial
  Barcode component
  misc_feature (33)..(34): n is a, c, g, or t
  misc_feature (43)..(44): n is a, c, g, or t
  misc_feature (53)..(54): n is a, c, g, or t
tttttttaagcagtggtatcaacgcagagtacnnatgtcgagnnctaacgganntttttttttttttttttttttttttttttt

SEQ ID NO: 4321 - DNA, 84 bp, Artificial
  Barcode component
  misc_feature (33)..(34): n is a, c, g, or t
  misc_feature (43)..(44): n is a, c, g, or t
  misc_feature (53)..(54): n is a, c, g, or t
tttttttaagcagtggtatcaacgcagagtacnnatgtcgagnntatcgaggnntttttttttttttttttttttttttttttt

SEQ ID NO: 4322 - DNA, 84 bp, Artificial
  Barcode component
  misc_feature (33)..(34): n is a, c, g, or t
  misc_feature (43)..(44): n is a, c, g, or t
  misc_feature (53)..(54): n is a, c, g, or t
tttttttaagcagtggtatcaacgcagagtacnnatgtcgagnncatagcctnntttttttttttttttttttttttttttttt

SEQ ID NO: 4323 - DNA, 84 bp, Artificial
  Barcode component
  misc_feature (33)..(34): n is a, c, g, or t
  misc_feature (43)..(44): n is a, c, g, or t
  misc_feature (53)..(54): n is a, c, g, or t
tttttttaagcagtggtatcaacgcagagtacnnatgtcgagnnatcgagacnntttttttttttttttttttttttttttttt

SEQ ID NO: 4324 - DNA, 84 bp, Artificial
  Barcode component
  misc_feature (33)..(34): n is a, c, g, or t
  misc_feature (43)..(44): n is a, c, g, or t
  misc_feature (53)..(54): n is a, c, g, or t
tttttttaagcagtggtatcaacgcagagtacnnatgtcgagnnggaagagtnntttttttttttttttttttttttttttttt

SEQ ID NO: 4325 - DNA, 84 bp, Artificial
  Barcode component
  misc_feature (33)..(34): n is a, c, g, or t
  misc_feature (43)..(44): n is a, c, g, or t
  misc_feature (53)..(54): n is a, c, g, or t
tttttttaagcagtggtatcaacgcagagtacnnatgtcgagnnccaagtagnntttttttttttttttttttttttttttttt

SEQ ID NO: 4326 - DNA, 84 bp, Artificial
  Barcode component
  misc_feature (33)..(34): n is a, c, g, or t
  misc_feature (43)..(44): n is a, c, g, or t
  misc_feature (53)..(54): n is a, c, g, or t
tttttttaagcagtggtatcaacgcagagtacnnatgtcgagnnctgaacagnntttttttttttttttttttttttttttttt

SEQ ID NO: 4327 - DNA, 84 bp, Artificial
  Barcode component
  misc_feature (33)..(34): n is a, c, g, or t
  misc_feature (43)..(44): n is a, c, g, or t
  misc_feature (53)..(54): n is a, c, g, or t
tttttttaagcagtggtatcaacgcagagtacnnatgtcgagnngtaggttcnntttttttttttttttttttttttttttttt

SEQ ID NO: 4328 - DNA, 84 bp, Artificial
  Barcode component
  misc_feature (33)..(34): n is a, c, g, or t
  misc_feature (43)..(44): n is a, c, g, or t
  misc_feature (53)..(54): n is a, c, g, or t
tttttttaagcagtggtatcaacgcagagtacnnatgtcgagnngtatggacnntttttttttttttttttttttttttttttt

SEQ ID NO: 4329 - DNA, 84 bp, Artificial
  Barcode component
  misc_feature (33)..(34): n is a, c, g, or t
  misc_feature (43)..(44): n is a, c, g, or t
  misc_feature (53)..(54): n is a, c, g, or t
tttttttaagcagtggtatcaacgcagagtacnnatgtcgagnntcgcaacanntttttttttttttttttttttttttttttt

SEQ ID NO: 4330 - DNA, 84 bp, Artificial
  Barcode component
  misc_feature (33)..(34): n is a, c, g, or t
  misc_feature (43)..(44): n is a, c, g, or t
  misc_feature (53)..(54): n is a, c, g, or t
tttttttaagcagtggtatcaacgcagagtacnnatgtcgagnnccgctaatnntttttttttttttttttttttttttttttt

SEQ ID NO: 4331 - DNA, 84 bp, Artificial
  Barcode component
  misc_feature (33)..(34): n is a, c, g, or t
  misc_feature (43)..(44): n is a, c, g, or t
  misc_feature (53)..(54): n is a, c, g, or t
tttttttaagcagtggtatcaacgcagagtacnnatgtcgagnngattcgcanntttttttttttttttttttttttttttttt

SEQ ID NO: 4332 - DNA, 84 bp, Artificial
  Barcode component
  misc_feature (33)..(34): n is a, c, g, or t
  misc_feature (43)..(44): n is a, c, g, or t
  misc_feature (53)..(54): n is a, c, g, or t
tttttttaagcagtggtatcaacgcagagtacnnatgtcgagnncgatggaanntttttttttttttttttttttttttttttt

SEQ ID NO: 4333 - DNA, 84 bp, Artificial
  Barcode component
  misc_feature (33)..(34): n is a, c, g, or t
  misc_feature (43)..(44): n is a, c, g, or t
  misc_feature (53)..(54): n is a, c, g, or t
tttttttaagcagtggtatcaacgcagagtacnnatgtcgagnnagcaagganntttttttttttttttttttttttttttttt

SEQ ID NO: 4334 - DNA, 84 bp, Artificial
  Barcode component
  misc_feature (33)..(34): n is a, c, g, or t
  misc_feature (43)..(44): n is a, c, g, or t
  misc_feature (53)..(54): n is a, c, g, or t
tttttttaagcagtggtatcaacgcagagtacnnatgtcgagnncgtagcaanntttttttttttttttttttttttttttttt

SEQ ID NO: 4335 - DNA, 84 bp, Artificial
  Barcode component
  misc_feature (33)..(34): n is a, c, g, or t
  misc_feature (43)..(44): n is a, c, g, or t
  misc_feature (53)..(54): n is a, c, g, or t
tttttttaagcagtggtatcaacgcagagtacnnatgtcgagnntggcagtanntttttttttttttttttttttttttttttt

SEQ ID NO: 4336 - DNA, 84 bp, Artificial
  Barcode component
  misc_feature (33)..(34): n is a, c, g, or t
  misc_feature (43)..(44): n is a, c, g, or t
  misc_feature (53)..(54): n is a, c, g, or t
tttttttaagcagtggtatcaacgcagagtacnnatgtcgagnncggtagttnntttttttttttttttttttttttttttttt

SEQ ID NO: 4337 - DNA, 84 bp, Artificial
  Barcode component
  misc_feature (33)..(34): n is a, c, g, or t
  misc_feature (43)..(44): n is a, c, g, or t
  misc_feature (53)..(54): n is a, c, g, or t
tttttttaagcagtggtatcaacgcagagtacnnatgtcgagnntgacttcgnntttttttttttttttttttttttttttttt

SEQ ID NO: 4338 - DNA, 84 bp, Artificial
  Barcode component
  misc_feature (33)..(34): n is a, c, g, or t
  misc_feature (43)..(44): n is a, c, g, or t
  misc_feature (53)..(54): n is a, c, g, or t
tttttttaagcagtggtatcaacgcagagtacnnatgtcgagnngagtgcaanntttttttttttttttttttttttttttttt

SEQ ID NO: 4339 - DNA, 84 bp, Artificial
  Barcode component
  misc_feature (33)..(34): n is a, c, g, or t
  misc_feature (43)..(44): n is a, c, g, or t
  misc_feature (53)..(54): n is a, c, g, or t
tttttttaagcagtggtatcaacgcagagtacnnatgtcgagnnacggtaacnntttttttttttttttttttttttttttttt

SEQ ID NO: 4340 - DNA, 84 bp, Artificial
  Barcode component
  misc_feature (33)..(34): n is a, c, g, or t
  misc_feature (43)..(44): n is a, c, g, or t
  misc_feature (53)..(54): n is a, c, g, or t
tttttttaagcagtggtatcaacgcagagtacnnatgtcgagnnaagtggtgnntttttttttttttttttttttttttttttt

SEQ ID NO: 4341 - DNA, 84 bp, Artificial
  Barcode component
  misc_feature (33)..(34): n is a, c, g, or t
  misc_feature (43)..(44): n is a, c, g, or t
  misc_feature (53)..(54): n is a, c, g, or t
tttttttaagcagtggtatcaacgcagagtacnnatgtcgagnnggagacaanntttttttttttttttttttttttttttttt

SEQ ID NO: 4342 - DNA, 84 bp, Artificial
  Barcode component
  misc_feature (33)..(34): n is a, c, g, or t
  misc_feature (43)..(44): n is a, c, g, or t
  misc_feature (53)..(54): n is a, c, g, or t
tttttttaagcagtggtatcaacgcagagtacnnatgtcgagnntcaaggacnntttttttttttttttttttttttttttttt

SEQ ID NO: 4343 - DNA, 84 bp, Artificial
  Barcode component
  misc_feature (33)..(34): n is a, c, g, or t
  misc_feature (43)..(44): n is a, c, g, or t
  misc_feature (53)..(54): n is a, c, g, or t
tttttttaagcagtggtatcaacgcagagtacnnatgtcgagnnaagagagcnntttttttttttttttttttttttttttttt

SEQ ID NO: 4344 - DNA, 84 bp, Artificial
  Barcode component
  misc_feature (33)..(34): n is a, c, g, or t
  misc_feature (43)..(44): n is a, c, g, or t
  misc_feature (53)..(54): n is a, c, g, or t
tttttttaagcagtggtatcaacgcagagtacnnatgtcgagnncgagagatnntttttttttttttttttttttttttttttt

SEQ ID NO: 4345 - DNA, 84 bp, Artificial
  Barcode component
  misc_feature (33)..(34): n is a, c, g, or t
  misc_feature (43)..(44): n is a, c, g, or t
  misc_feature (53)..(54): n is a, c, g, or t
tttttttaagcagtggtatcaacgcagagtacnnatgtcgagnnacagatggnntttttttttttttttttttttttttttttt

SEQ ID NO: 4346 - DNA, 84 bp, Artificial
  Barcode component
  misc_feature (33)..(34): n is a, c, g, or t
  misc_feature (43)..(44): n is a, c, g, or t
  misc_feature (53)..(54): n is a, c, g, or t
tttttttaagcagtggtatcaacgcagagtacnnatgtcgagnnaggagtcanntttttttttttttttttttttttttttttt

SEQ ID NO: 4347 - DNA, 84 bp, Artificial
  Barcode component
  misc_feature (33)..(34): n is a, c, g, or t
  misc_feature (43)..(44): n is a, c, g, or t
  misc_feature (53)..(54): n is a, c, g, or t
tttttttaagcagtggtatcaacgcagagtacnnatgtcgagnncgtgttacnntttttttttttttttttttttttttttttt

SEQ ID NO: 4348 - DNA, 84 bp, Artificial
  Barcode component
  misc_feature (33)..(34): n is a, c, g, or t
  misc_feature (43)..(44): n is a, c, g, or t
  misc_feature (53)..(54): n is a, c, g, or t
tttttttaagcagtggtatcaacgcagagtacnnatgtcgagnntagtgtgcnntttttttttttttttttttttttttttttt

SEQ ID NO: 4349 - DNA, 84 bp, Artificial
  Barcode component
  misc_feature (33)..(34): n is a, c, g, or t
  misc_feature (43)..(44): n is a, c, g, or t
  misc_feature (53)..(54): n is a, c, g, or t
tttttttaagcagtggtatcaacgcagagtacnnatgtcgagnnctcatgacnntttttttttttttttttttttttttttttt

SEQ ID NO: 4350 - DNA, 84 bp, Artificial
  Barcode component
  misc_feature (33)..(34): n is a, c, g, or t
  misc_feature (43)..(44): n is a, c, g, or t
  misc_feature (53)..(54): n is a, c, g, or t
tttttttaagcagtggtatcaacgcagagtacnnatgtcgagnngtatccagnntttttttttttttttttttttttttttttt

SEQ ID NO: 4351 - DNA, 84 bp, Artificial
  Barcode component
  misc_feature (33)..(34): n is a, c, g, or t
  misc_feature (43)..(44): n is a, c, g, or t
  misc_feature (53)..(54): n is a, c, g, or t
tttttttaagcagtggtatcaacgcagagtacnnatgtcgagnnacgcctatnntttttttttttttttttttttttttttttt

SEQ ID NO: 4352 - DNA, 84 bp, Artificial
  Barcode component
  misc_feature (33)..(34): n is a, c, g, or t
  misc_feature (43)..(44): n is a, c, g, or t
  misc_feature (53)..(54): n is a, c, g, or t
tttttttaagcagtggtatcaacgcagagtacnnatgtcgagnnaacgacctnntttttttttttttttttttttttttttttt

SEQ ID NO: 4353 - DNA, 84 bp, Artificial
  Barcode component
  misc_feature (33)..(34): n is a, c, g, or t
  misc_feature (43)..(44): n is a, c, g, or t
  misc_feature (53)..(54): n is a, c, g, or t
tttttttaagcagtggtatcaacgcagagtacnnatgtcgagnnatcaggctnntttttttttttttttttttttttttttttt

SEQ ID NO: 4354 - DNA, 84 bp, Artificial
  Barcode component
  misc_feature (33)..(34): n is a, c, g, or t
  misc_feature (43)..(44): n is a, c, g, or t
  misc_feature (53)..(54): n is a, c, g, or t
tttttttaagcagtggtatcaacgcagagtacnnatgtcgagnncaagttcgnntttttttttttttttttttttttttttttt

SEQ ID NO: 4355 - DNA, 84 bp, Artificial
  Barcode component
  misc_feature (33)..(34): n is a, c, g, or t
  misc_feature (43)..(44): n is a, c, g, or t
  misc_feature (53)..(54): n is a, c, g, or t
tttttttaagcagtggtatcaacgcagagtacnnatgtcgagnntagccaganntttttttttttttttttttttttttttttt

SEQ ID NO: 4356 - DNA, 84 bp, Artificial
  Barcode component
  misc_feature (33)..(34): n is a, c, g, or t
  misc_feature (43)..(44): n is a, c, g, or t
  misc_feature (53)..(54): n is a, c, g, or t
tttttttaagcagtggtatcaacgcagagtacnnatgtcgagnncaatcacgnntttttttttttttttttttttttttttttt

SEQ ID NO: 4357 - DNA, 84 bp, Artificial
  Barcode component
  misc_feature (33)..(34): n is a, c, g, or t
  misc_feature (43)..(44): n is a, c, g, or t
  misc_feature (53)..(54): n is a, c, g, or t
tttttttaagcagtggtatcaacgcagagtacnnatgtcgagnngcaacaagnntttttttttttttttttttttttttttttt

SEQ ID NO: 4358 - DNA, 84 bp, Artificial
  Barcode component
  misc_feature (33)..(34): n is a, c, g, or t
  misc_feature (43)..(44): n is a, c, g, or t
  misc_feature (53)..(54): n is a, c, g, or t
tttttttaagcagtggtatcaacgcagagtacnnatgtcgagnncacgacaanntttttttttttttttttttttttttttttt

SEQ ID NO: 4359 - DNA, 84 bp, Artificial
  Barcode component
  misc_feature (33)..(34): n is a, c, g, or t
  misc_feature (43)..(44): n is a, c, g, or t
  misc_feature (53)..(54): n is a, c, g, or t
tttttttaagcagtggtatcaacgcagagtacnnatgtcgagnntacggaganntttttttttttttttttttttttttttttt

SEQ ID NO: 4360 - DNA, 84 bp, Artificial
  Barcode component
  misc_feature (33)..(34): n is a, c, g, or t
  misc_feature (43)..(44): n is a, c, g, or t
  misc_feature (53)..(54): n is a, c, g, or t
tttttttaagcagtggtatcaacgcagagtacnnatgtcgagnncgacaaganntttttttttttttttttttttttttttttt

SEQ ID NO: 4361 - DNA, 84 bp, Artificial
  Barcode component
  misc_feature (33)..(34): n is a, c, g, or t
  misc_feature (43)..(44): n is a, c, g, or t
  misc_feature (53)..(54): n is a, c, g, or t
tttttttaagcagtggtatcaacgcagagtacnnatgtcgagnncgaagtganntttttttttttttttttttttttttttttt

SEQ ID NO: 4362 - DNA, 84 bp, Artificial
  Barcode component
  misc_feature (33)..(34): n is a, c, g, or t
  misc_feature (43)..(44): n is a, c, g, or t
  misc_feature (53)..(54): n is a, c, g, or t
tttttttaagcagtggtatcaacgcagagtacnnatgtcgagnnagctggtanntttttttttttttttttttttttttttttt

SEQ ID NO: 4363 - DNA, 84 bp, Artificial
  Barcode component
  misc_feature (33)..(34): n is a, c, g, or t
  misc_feature (43)..(44): n is a, c, g, or t
  misc_feature (53)..(54): n is a, c, g, or t
tttttttaagcagtggtatcaacgcagagtacnnatgtcgagnnaactaggcnntttttttttttttttttttttttttttttt

SEQ ID NO: 4364 - DNA, 84 bp, Artificial
  Barcode component
  misc_feature (33)..(34): n is a, c, g, or t
  misc_feature (43)..(44): n is a, c, g, or t
  misc_feature (53)..(54): n is a, c, g, or t
tttttttaagcagtggtatcaacgcagagtacnnatgtcgagnncagcaagtnntttttttttttttttttttttttttttttt

SEQ ID NO: 4365 - DNA, 84 bp, Artificial
  Barcode component
  misc_feature (33)..(34): n is a, c, g, or t
  misc_feature (43)..(44): n is a, c, g, or t
  misc_feature (53)..(54): n is a, c, g, or t
tttttttaagcagtggtatcaacgcagagtacnnatgtcgagnnacgaggtanntttttttttttttttttttttttttttttt

SEQ ID NO: 4366 - DNA, 84 bp, Artificial
  Barcode component
  misc_feature (33)..(34): n is a, c, g, or t
  misc_feature (43)..(44): n is a, c, g, or t
  misc_feature (53)..(54): n is a, c, g, or t
tttttttaagcagtggtatcaacgcagagtacnnatgtcgagnncatcttccnntttttttttttttttttttttttttttttt

SEQ ID NO: 4367 - DNA, 84 bp, Artificial
  Barcode component
  misc_feature (33)..(34): n is a, c, g, or t
  misc_feature (43)..(44): n is a, c, g, or t
  misc_feature (53)..(54): n is a, c, g, or t
tttttttaagcagtggtatcaacgcagagtacnnatgtcgagnncctgaatcnntttttttttttttttttttttttttttttt

SEQ ID NO: 4368 - DNA, 84 bp, Artificial
  Barcode component
  misc_feature (33)..(34): n is a, c, g, or t
  misc_feature (43)..(44): n is a, c, g, or t
  misc_feature (53)..(54): n is a, c, g, or t
tttttttaagcagtggtatcaacgcagagtacnnatgtcgagnntgcagactnntttttttttttttttttttttttttttttt

SEQ ID NO: 4369 - DNA, 84 bp, Artificial
  Barcode component
  misc_feature (33)..(34): n is a, c, g, or t
  misc_feature (43)..(44): n is a, c, g, or t
  misc_feature (53)..(54): n is a, c, g, or t
tttttttaagcagtggtatcaacgcagagtacnnatgtcgagnnagatgtggnntttttttttttttttttttttttttttttt

SEQ ID NO: 4370 - DNA, 84 bp, Artificial
  Barcode component
  misc_feature (33)..(34): n is a, c, g, or t
  misc_feature (43)..(44): n is a, c, g, or t
  misc_feature (53)..(54): n is a, c, g, or t
tttttttaagcagtggtatcaacgcagagtacnnatgtcgagnnagttcgacnntttttttttttttttttttttttttttttt

SEQ ID NO: 4371 - DNA, 84 bp, Artificial
  Barcode component
  misc_feature (33)..(34): n is a, c, g, or t
  misc_feature (43)..(44): n is a, c, g, or t
  misc_feature (53)..(54): n is a, c, g, or t
tttttttaagcagtggtatcaacgcagagtacnnatgtcgagnnacaacctcnntttttttttttttttttttttttttttttt

SEQ ID NO: 4372 - DNA, 84 bp, Artificial
  Barcode component
  misc_feature (33)..(34): n is a, c, g, or t
  misc_feature (43)..(44): n is a, c, g, or t
  misc_feature (53)..(54): n is a, c, g, or t
tttttttaagcagtggtatcaacgcagagtacnnatgtcgagnncatggtagnntttttttttttttttttttttttttttttt

SEQ ID NO: 4373 - DNA, 84 bp, Artificial
  Barcode component
  misc_feature (33)..(34): n is a, c, g, or t
  misc_feature (43)..(44): n is a, c, g, or t
  misc_feature (53)..(54): n is a, c, g, or t
tttttttaagcagtggtatcaacgcagagtacnnatgtcgagnncgtatctcnntttttttttttttttttttttttttttttt

SEQ ID NO: 4374 - DNA, 84 bp, Artificial
  Barcode component
  misc_feature (33)..(34): n is a, c, g, or t
  misc_feature (43)..(44): n is a, c, g, or t
  misc_feature (53)..(54): n is a, c, g, or t
tttttttaagcagtggtatcaacgcagagtacnnatgtcgagnncctagttcnntttttttttttttttttttttttttttttt

SEQ ID NO: 4375 - DNA, 84 bp, Artificial
  Barcode component
  misc_feature (33)..(34): n is a, c, g, or t
  misc_feature (43)..(44): n is a, c, g, or t
  misc_feature (53)..(54): n is a, c, g, or t
tttttttaagcagtggtatcaacgcagagtacnnatgtcgagnncaagagtcnntttttttttttttttttttttttttttttt

SEQ ID NO: 4376 - DNA, 84 bp, Artificial
  Barcode component
  misc_feature (33)..(34): n is a, c, g, or t
  misc_feature (43)..(44): n is a, c, g, or t
  misc_feature (53)..(54): n is a, c, g, or t
tttttttaagcagtggtatcaacgcagagtacnnaacgtgtcnnaatcggcanntttttttttttttttttttttttttttttt

SEQ ID NO: 4377 - DNA, 84 bp, Artificial
  Barcode component
  misc_feature (33)..(34): n is a, c, g, or t
  misc_feature (43)..(44): n is a, c, g, or t
  misc_feature (53)..(54): n is a, c, g, or t
tttttttaagcagtggtatcaacgcagagtacnnaacgtgtcnntacggcatnntttttttttttttttttttttttttttttt

SEQ ID NO: 4378 - DNA, 84 bp, Artificial
  Barcode component
  misc_feature (33)..(34): n is a, c, g, or t
  misc_feature (43)..(44): n is a, c, g, or t
  misc_feature (53)..(54): n is a, c, g, or t
tttttttaagcagtggtatcaacgcagagtacnnaacgtgtcnnttggatcgnntttttttttttttttttttttttttttttt

SEQ ID NO: 4379 - DNA, 84 bp, Artificial
  Barcode component
  misc_feature (33)..(34): n is a, c, g, or t
  misc_feature (43)..(44): n is a, c, g, or t
  misc_feature (53)..(54): n is a, c, g, or t
tttttttaagcagtggtatcaacgcagagtacnnaacgtgtcnntggaacganntttttttttttttttttttttttttttttt

SEQ ID NO: 4380 - DNA, 84 bp, Artificial
  Barcode component
  misc_feature (33)..(34): n is a, c, g, or t
  misc_feature (43)..(44): n is a, c, g, or t
  misc_feature (53)..(54): n is a, c, g, or t
tttttttaagcagtggtatcaacgcagagtacnnaacgtgtcnnggcaatcanntttttttttttttttttttttttttttttt

SEQ ID NO: 4381 - DNA, 84 bp, Artificial
  Barcode component
  misc_feature (33)..(34): n is a, c, g, or t
  misc_feature (43)..(44): n is a, c, g, or t
  misc_feature (53)..(54): n is a, c, g, or t
tttttttaagcagtggtatcaacgcagagtacnnaacgtgtcnngaatccganntttttttttttttttttttttttttttttt

SEQ ID NO: 4382 - DNA, 84 bp, Artificial
  Barcode component
  misc_feature (33)..(34): n is a, c, g, or t
  misc_feature (43)..(44): n is a, c, g, or t
  misc_feature (53)..(54): n is a, c, g, or t
tttttttaagcagtggtatcaacgcagagtacnnaacgtgtcnnttacggtgnntttttttttttttttttttttttttttttt

SEQ ID NO: 4383 - DNA, 84 bp, Artificial
  Barcode component
  misc_feature (33)..(34): n is a, c, g, or t
  misc_feature (43)..(44): n is a, c, g, or t
  misc_feature (53)..(54): n is a, c, g, or t
tttttttaagcagtggtatcaacgcagagtacnnaacgtgtcnncatatcggnntttttttttttttttttttttttttttttt

SEQ ID NO: 4384 - DNA, 84 bp, Artificial
  Barcode component
  misc_feature (33)..(34): n is a, c, g, or t
  misc_feature (43)..(44): n is a, c, g, or t
  misc_feature (53)..(54): n is a, c, g, or t
tttttttaagcagtggtatcaacgcagagtacnnaacgtgtcnncttcggtanntttttttttttttttttttttttttttttt

SEQ ID NO: 4385 - DNA, 84 bp, Artificial
  Barcode component
  misc_feature (33)..(34): n is a, c, g, or t
  misc_feature (43)..(44): n is a, c, g, or t
  misc_feature (53)..(54): n is a, c, g, or t
tttttttaagcagtggtatcaacgcagagtacnnaacgtgtcnntcctaacgnntttttttttttttttttttttttttttttt

SEQ ID NO: 4386 - DNA, 84 bp, Artificial
  Barcode component
  misc_feature (33)..(34): n is a, c, g, or t
  misc_feature (43)..(44): n is a, c, g, or t
  misc_feature (53)..(54): n is a, c, g, or t
tttttttaagcagtggtatcaacgcagagtacnnaacgtgtcnngtaagccanntttttttttttttttttttttttttttttt

SEQ ID NO: 4387 - DNA, 84 bp, Artificial
  Barcode component
  misc_feature (33)..(34): n is a, c, g, or t
  misc_feature (43)..(44): n is a, c, g, or t
  misc_feature (53)..(54): n is a, c, g, or t
tttttttaagcagtggtatcaacgcagagtacnnaacgtgtcnntaaggtggnntttttttttttttttttttttttttttttt

SEQ ID NO: 4388 - DNA, 84 bp, Artificial
  Barcode component
  misc_feature (33)..(34): n is a, c, g, or t
  misc_feature (43)..(44): n is a, c, g, or t
  misc_feature (53)..(54): n is a, c, g, or t
tttttttaagcagtggtatcaacgcagagtacnnaacgtgtcnnggtaagctnntttttttttttttttttttttttttttttt

SEQ ID NO: 4389 - DNA, 84 bp, Artificial
  Barcode component
  misc_feature (33)..(34): n is a, c, g, or t
  misc_feature (43)..(44): n is a, c, g, or t
  misc_feature (53)..(54): n is a, c, g, or t
tttttttaagcagtggtatcaacgcagagtacnnaacgtgtcnntgtgtcganntttttttttttttttttttttttttttttt

SEQ ID NO: 4390 - DNA, 84 bp, Artificial
  Barcode component
  misc_feature (33)..(34): n is a, c, g, or t
  misc_feature (43)..(44): n is a, c, g, or t
  misc_feature (53)..(54): n is a, c, g, or t
tttttttaagcagtggtatcaacgcagagtacnnaacgtgtcnngagcatganntttttttttttttttttttttttttttttt

SEQ ID NO: 4391 - DNA, 84 bp, Artificial
  Barcode component
  misc_feature (33)..(34): n is a, c, g, or t
  misc_feature (43)..(44): n is a, c, g, or t
  misc_feature (53)..(54): n is a, c, g, or t
tttttttaagcagtggtatcaacgcagagtacnnaacgtgtcnntcgaagtcnntttttttttttttttttttttttttttttt

SEQ ID NO: 4392 - DNA, 84 bp, Artificial
  Barcode component
  misc_feature (33)..(34): n is a, c, g, or t
  misc_feature (43)..(44): n is a, c, g, or t
  misc_feature (53)..(54): n is a, c, g, or t
tttttttaagcagtggtatcaacgcagagtacnnaacgtgtcnnggtgaacanntttttttttttttttttttttttttttttt

SEQ ID NO: 4393 - DNA, 84 bp, Artificial
  Barcode component
  misc_feature (33)..(34): n is a, c, g, or t
  misc_feature (43)..(44): n is a, c, g, or t
  misc_feature (53)..(54): n is a, c, g, or t
tttttttaagcagtggtatcaacgcagagtacnnaacgtgtcnnacatgcacnntttttttttttttttttttttttttttttt

SEQ ID NO: 4394 - DNA, 84 bp, Artificial
  Barcode component
  misc_feature (33)..(34): n is a, c, g, or t
  misc_feature (43)..(44): n is a, c, g, or t
  misc_feature (53)..(54): n is a, c, g, or t
tttttttaagcagtggtatcaacgcagagtacnnaacgtgtcnnccaacagtnntttttttttttttttttttttttttttttt

SEQ ID NO: 4395 - DNA, 84 bp, Artificial
  Barcode component
  misc_feature (33)..(34): n is a, c, g, or t
  misc_feature (43)..(44): n is a, c, g, or t
  misc_feature (53)..(54): n is a, c, g, or t
tttttttaagcagtggtatcaacgcagagtacnnaacgtgtcnnagaacagcnntttttttttttttttttttttttttttttt

SEQ ID NO: 4396 - DNA, 84 bp, Artificial
  Barcode component
  misc_feature (33)..(34): n is a, c, g, or t
  misc_feature (43)..(44): n is a, c, g, or t
  misc_feature (53)..(54): n is a, c, g, or t
tttttttaagcagtggtatcaacgcagagtacnnaacgtgtcnngaacacgtnntttttttttttttttttttttttttttttt

SEQ ID NO: 4397 - DNA, 84 bp, Artificial
  Barcode component
  misc_feature (33)..(34): n is a, c, g, or t
  misc_feature (43)..(44): n is a, c, g, or t
  misc_feature (53)..(54): n is a, c, g, or t
tttttttaagcagtggtatcaacgcagagtacnnaacgtgtcnnggtcttcanntttttttttttttttttttttttttttttt

SEQ ID NO: 4398 - DNA, 84 bp, Artificial
  Barcode component
  misc_feature (33)..(34): n is a, c, g, or t
  misc_feature (43)..(44): n is a, c, g, or t
  misc_feature (53)..(54): n is a, c, g, or t
tttttttaagcagtggtatcaacgcagagtacnnaacgtgtcnnaggttcagnntttttttttttttttttttttttttttttt

SEQ ID NO: 4399 - DNA, 84 bp, Artificial
  Barcode component
  misc_feature (33)..(34): n is a, c, g, or t
  misc_feature (43)..(44): n is a, c, g, or t
  misc_feature (53)..(54): n is a, c, g, or t
tttttttaagcagtggtatcaacgcagagtacnnaacgtgtcnnctagagcanntttttttttttttttttttttttttttttt

SEQ ID NO: 4400 - DNA, 84 bp, Artificial
  Barcode component
  misc_feature (33)..(34): n is a, c, g, or t
  misc_feature (43)..(44): n is a, c, g, or t
  misc_feature (53)..(54): n is a, c, g, or t
tttttttaagcagtggtatcaacgcagagtacnnaacgtgtcnncttctagcnntttttttttttttttttttttttttttttt

SEQ ID NO: 4401 - DNA, 84 bp, Artificial
  Barcode component
  misc_feature (33)..(34): n is a, c, g, or t
  misc_feature (43)..(44): n is a, c, g, or t
  misc_feature (53)..(54): n is a, c, g, or t
tttttttaagcagtggtatcaacgcagagtacnnaacgtgtcnngagtaacgnntttttttttttttttttttttttttttttt

SEQ ID NO: 4402 - DNA, 84 bp, Artificial
  Barcode component
  misc_feature (33)..(34): n is a, c, g, or t
  misc_feature (43)..(44): n is a, c, g, or t
  misc_feature (53)..(54): n is a, c, g, or t
tttttttaagcagtggtatcaacgcagagtacnnaacgtgtcnnctaagaggnntttttttttttttttttttttttttttttt

SEQ ID NO: 4403 - DNA, 84 bp, Artificial
  Barcode component
  misc_feature (33)..(34): n is a, c, g, or t
  misc_feature (43)..(44): n is a, c, g, or t
  misc_feature (53)..(54): n is a, c, g, or t
tttttttaagcagtggtatcaacgcagagtacnnaacgtgtcnnacgtgtagnntttttttttttttttttttttttttttttt

SEQ ID NO: 4404 - DNA, 84 bp, Artificial
  Barcode component
  misc_feature (33)..(34): n is a, c, g, or t
  misc_feature (43)..(44): n is a, c, g, or t
  misc_feature (53)..(54): n is a, c, g, or t
tttttttaagcagtggtatcaacgcagagtacnnaacgtgtcnnactacaggnntttttttttttttttttttttttttttttt

SEQ ID NO: 4405 - DNA, 84 bp, Artificial
  Barcode component
  misc_feature (33)..(34): n is a, c, g, or t
  misc_feature (43)..(44): n is a, c, g, or t
  misc_feature (53)..(54): n is a, c, g, or t
tttttttaagcagtggtatcaacgcagagtacnnaacgtgtcnntacaggtcnntttttttttttttttttttttttttttttt

SEQ ID NO: 4406 - DNA, 84 bp, Artificial
  Barcode component
  misc_feature (33)..(34): n is a, c, g, or t
  misc_feature (43)..(44): n is a, c, g, or t
  misc_feature (53)..(54): n is a, c, g, or t
tttttttaagcagtggtatcaacgcagagtacnnaacgtgtcnnctcacatgnntttttttttttttttttttttttttttttt

SEQ ID NO: 4407 - DNA, 84 bp, Artificial
  Barcode component
  misc_feature (33)..(34): n is a, c, g, or t
  misc_feature (43)..(44): n is a, c, g, or t
  misc_feature (53)..(54): n is a, c, g, or t
tttttttaagcagtggtatcaacgcagagtacnnaacgtgtcnnactaggagnntttttttttttttttttttttttttttttt

SEQ ID NO: 4408 - DNA, 84 bp, Artificial
  Barcode component
  misc_feature (33)..(34): n is a, c, g, or t
  misc_feature (43)..(44): n is a, c, g, or t
  misc_feature (53)..(54): n is a, c, g, or t
tttttttaagcagtggtatcaacgcagagtacnnaacgtgtcnnccatagganntttttttttttttttttttttttttttttt

SEQ ID NO: 4409 - DNA, 84 bp, Artificial
  Barcode component
  misc_feature (33)..(34): n is a, c, g, or t
  misc_feature (43)..(44): n is a, c, g, or t
  misc_feature (53)..(54): n is a, c, g, or t
tttttttaagcagtggtatcaacgcagagtacnnaacgtgtcnnggagaatcnntttttttttttttttttttttttttttttt

SEQ ID NO: 4410 - DNA, 84 bp, Artificial
  Barcode component
  misc_feature (33)..(34): n is a, c, g, or t
  misc_feature (43)..(44): n is a, c, g, or t
  misc_feature (53)..(54): n is a, c, g, or t
tttttttaagcagtggtatcaacgcagagtacnnaacgtgtcnngccaagaanntttttttttttttttttttttttttttttt

SEQ ID NO: 4411 - DNA, 84 bp, Artificial
  Barcode component
  misc_feature (33)..(34): n is a, c, g, or t
  misc_feature (43)..(44): n is a, c, g, or t
  misc_feature (53)..(54): n is a, c, g, or t
tttttttaagcagtggtatcaacgcagagtacnnaacgtgtcnnaaggcaagnntttttttttttttttttttttttttttttt

SEQ ID NO: 4412 - DNA, 84 bp, Artificial
  Barcode component
  misc_feature (33)..(34): n is a, c, g, or t
  misc_feature (43)..(44): n is a, c, g, or t
  misc_feature (53)..(54): n is a, c, g, or t
tttttttaagcagtggtatcaacgcagagtacnnaacgtgtcnnaatgtcgcnntttttttttttttttttttttttttttttt

SEQ ID NO: 4413 - DNA, 84 bp, Artificial
  Barcode component
  misc_feature (33)..(34): n is a, c, g, or t
  misc_feature (43)..(44): n is a, c, g, or t
  misc_feature (53)..(54): n is a, c, g, or t
tttttttaagcagtggtatcaacgcagagtacnnaacgtgtcnnatggaaccnntttttttttttttttttttttttttttttt

SEQ ID NO: 4414 - DNA, 84 bp, Artificial
  Barcode component
  misc_feature (33)..(34): n is a, c, g, or t
  misc_feature (43)..(44): n is a, c, g, or t
  misc_feature (53)..(54): n is a, c, g, or t
tttttttaagcagtggtatcaacgcagagtacnnaacgtgtcnnagaggcatnntttttttttttttttttttttttttttttt

SEQ ID NO: 4415 - DNA, 84 bp, Artificial
  Barcode component
  misc_feature (33)..(34): n is a, c, g, or t
  misc_feature (43)..(44): n is a, c, g, or t
  misc_feature (53)..(54): n is a, c, g, or t
tttttttaagcagtggtatcaacgcagagtacnnaacgtgtcnntgcatagcnntttttttttttttttttttttttttttttt

SEQ ID NO: 4416 - DNA, 84 bp, Artificial
  Barcode component
  misc_feature (33)..(34): n is a, c, g, or t
  misc_feature (43)..(44): n is a, c, g, or t
  misc_feature (53)..(54): n is a, c, g, or t
tttttttaagcagtggtatcaacgcagagtacnnaacgtgtcnnctaacgganntttttttttttttttttttttttttttttt

SEQ ID NO: 4417 - DNA, 84 bp, Artificial
  Barcode component
  misc_feature (33)..(34): n is a, c, g, or t
  misc_feature (43)..(44): n is a, c, g, or t
  misc_feature (53)..(54): n is a, c, g, or t
tttttttaagcagtggtatcaacgcagagtacnnaacgtgtcnntatcgaggnntttttttttttttttttttttttttttttt

SEQ ID NO: 4418 - DNA, 84 bp, Artificial
  Barcode component
  misc_feature (33)..(34): n is a, c, g, or t
  misc_feature (43)..(44): n is a, c, g, or t
  misc_feature (53)..(54): n is a, c, g, or t
tttttttaagcagtggtatcaacgcagagtacnnaacgtgtcnncatagcctnntttttttttttttttttttttttttttttt

SEQ ID NO: 4419 - DNA, 84 bp, Artificial
  Barcode component
  misc_feature (33)..(34): n is a, c, g, or t
  misc_feature (43)..(44): n is a, c, g, or t
  misc_feature (53)..(54): n is a, c, g, or t
tttttttaagcagtggtatcaacgcagagtacnnaacgtgtcnnatcgagacnntttttttttttttttttttttttttttttt

SEQ ID NO: 4420 - DNA, 84 bp, Artificial
  Barcode component
  misc_feature (33)..(34): n is a, c, g, or t
  misc_feature (43)..(44): n is a, c, g, or t
  misc_feature (53)..(54): n is a, c, g, or t
tttttttaagcagtggtatcaacgcagagtacnnaacgtgtcnnggaagagtnntttttttttttttttttttttttttttttt

SEQ ID NO: 4421 - DNA, 84 bp, Artificial
  Barcode component
  misc_feature (33)..(34): n is a, c, g, or t
  misc_feature (43)..(44): n is a, c, g, or t
  misc_feature (53)..(54): n is a, c, g, or t
tttttttaagcagtggtatcaacgcagagtacnnaacgtgtcnnccaagtagnntttttttttttttttttttttttttttttt

SEQ ID NO: 4422 - DNA, 84 bp, Artificial
  Barcode component
  misc_feature (33)..(34): n is a, c, g, or t
  misc_feature (43)..(44): n is a, c, g, or t
  misc_feature (53)..(54): n is a, c, g, or t
tttttttaagcagtggtatcaacgcagagtacnnaacgtgtcnnctgaacagnntttttttttttttttttttttttttttttt

SEQ ID NO: 4423 - DNA, 84 bp, Artificial
  Barcode component
  misc_feature (33)..(34): n is a, c, g, or t
  misc_feature (43)..(44): n is a, c, g, or t
  misc_feature (53)..(54): n is a, c, g, or t
tttttttaagcagtggtatcaacgcagagtacnnaacgtgtcnngtaggttcnntttttttttttttttttttttttttttttt

SEQ ID NO: 4424 - DNA, 84 bp, Artificial
  Barcode component
  misc_feature (33)..(34): n is a, c, g, or t
  misc_feature (43)..(44): n is a, c, g, or t
  misc_feature (53)..(54): n is a, c, g, or t
tttttttaagcagtggtatcaacgcagagtacnnaacgtgtcnngtatggacnntttttttttttttttttttttttttttttt

SEQ ID NO: 4425 - DNA, 84 bp, Artificial
  Barcode component
  misc_feature (33)..(34): n is a, c, g, or t
  misc_feature (43)..(44): n is a, c, g, or t
  misc_feature (53)..(54): n is a, c, g, or t
tttttttaagcagtggtatcaacgcagagtacnnaacgtgtcnntcgcaacanntttttttttttttttttttttttttttttt

SEQ ID NO: 4426 - DNA, 84 bp, Artificial
  Barcode component
  misc_feature (33)..(34): n is a, c, g, or t
  misc_feature (43)..(44): n is a, c, g, or t
  misc_feature (53)..(54): n is a, c, g, or t
tttttttaagcagtggtatcaacgcagagtacnnaacgtgtcnnccgctaatnntttttttttttttttttttttttttttttt

SEQ ID NO: 4427 - DNA, 84 bp, Artificial
  Barcode component
  misc_feature (33)..(34): n is a, c, g, or t
  misc_feature (43)..(44): n is a, c, g, or t
  misc_feature (53)..(54): n is a, c, g, or t
tttttttaagcagtggtatcaacgcagagtacnnaacgtgtcnngattcgcanntttttttttttttttttttttttttttttt

SEQ ID NO: 4428 - DNA, 84 bp, Artificial
  Barcode component
  misc_feature (33)..(34): n is a, c, g, or t
  misc_feature (43)..(44): n is a, c, g, or t
  misc_feature (53)..(54): n is a, c, g, or t
tttttttaagcagtggtatcaacgcagagtacnnaacgtgtcnncgatggaanntttttttttttttttttttttttttttttt

SEQ ID NO: 4429 - DNA, 84 bp, Artificial
  Barcode component
  misc_feature (33)..(34): n is a, c, g, or t
  misc_feature (43)..(44): n is a, c, g, or t
  misc_feature (53)..(54): n is a, c, g, or t
tttttttaagcagtggtatcaacgcagagtacnnaacgtgtcnnagcaagganntttttttttttttttttttttttttttttt

SEQ ID NO: 4430 - DNA, 84 bp, Artificial
  Barcode component
  misc_feature (33)..(34): n is a, c, g, or t
  misc_feature (43)..(44): n is a, c, g, or t
  misc_feature (53)..(54): n is a, c, g, or t
tttttttaagcagtggtatcaacgcagagtacnnaacgtgtcnncgtagcaanntttttttttttttttttttttttttttttt

SEQ ID NO: 4431 - DNA, 84 bp, Artificial
  Barcode component
  misc_feature (33)..(34): n is a, c, g, or t
  misc_feature (43)..(44): n is a, c, g, or t
  misc_feature (53)..(54): n is a, c, g, or t
tttttttaagcagtggtatcaacgcagagtacnnaacgtgtcnntggcagtanntttttttttttttttttttttttttttttt

SEQ ID NO: 4432 - DNA, 84 bp, Artificial
  Barcode component
  misc_feature (33)..(34): n is a, c, g, or t
  misc_feature (43)..(44): n is a, c, g, or t
  misc_feature (53)..(54): n is a, c, g, or t
tttttttaagcagtggtatcaacgcagagtacnnaacgtgtcnncggtagttnntttttttttttttttttttttttttttttt

SEQ ID NO: 4433 - DNA, 84 bp, Artificial
  Barcode component
  misc_feature (33)..(34): n is a, c, g, or t
  misc_feature (43)..(44): n is a, c, g, or t
  misc_feature (53)..(54): n is a, c, g, or t
tttttttaagcagtggtatcaacgcagagtacnnaacgtgtcnntgacttcgnntttttttttttttttttttttttttttttt

SEQ ID NO: 4434 - DNA, 84 bp, Artificial
  Barcode component
  misc_feature (33)..(34): n is a, c, g, or t
  misc_feature (43)..(44): n is a, c, g, or t
  misc_feature (53)..(54): n is a, c, g, or t
tttttttaagcagtggtatcaacgcagagtacnnaacgtgtcnngagtgcaanntttttttttttttttttttttttttttttt

SEQ ID NO: 4435 - DNA, 84 bp, Artificial
  Barcode component
  misc_feature (33)..(34): n is a, c, g, or t
  misc_feature (43)..(44): n is a, c, g, or t
  misc_feature (53)..(54): n is a, c, g, or t
tttttttaagcagtggtatcaacgcagagtacnnaacgtgtcnnacggtaacnntttttttttttttttttttttttttttttt

SEQ ID NO: 4436 - DNA, 84 bp, Artificial
  Barcode component
  misc_feature (33)..(34): n is a, c, g, or t
  misc_feature (43)..(44): n is a, c, g, or t
  misc_feature (53)..(54): n is a, c, g, or t
tttttttaagcagtggtatcaacgcagagtacnnaacgtgtcnnaagtggtgnntttttttttttttttttttttttttttttt

SEQ ID NO: 4437 - DNA, 84 bp, Artificial
  Barcode component
  misc_feature (33)..(34): n is a, c, g, or t
  misc_feature (43)..(44): n is a, c, g, or t
  misc_feature (53)..(54): n is a, c, g, or t
tttttttaagcagtggtatcaacgcagagtacnnaacgtgtcnnggagacaanntttttttttttttttttttttttttttttt

SEQ ID NO: 4438 - DNA, 84 bp, Artificial
  Barcode component
  misc_feature (33)..(34): n is a, c, g, or t
  misc_feature (43)..(44): n is a, c, g, or t
  misc_feature (53)..(54): n is a, c, g, or t
tttttttaagcagtggtatcaacgcagagtacnnaacgtgtcnntcaaggacnntttttttttttttttttttttttttttttt

SEQ ID NO: 4439 - DNA, 84 bp, Artificial
  Barcode component
  misc_feature (33)..(34): n is a, c, g, or t
  misc_feature (43)..(44): n is a, c, g, or t
  misc_feature (53)..(54): n is a, c, g, or t
tttttttaagcagtggtatcaacgcagagtacnnaacgtgtcnnaagagagcnntttttttttttttttttttttttttttttt

SEQ ID NO: 4440 - DNA, 84 bp, Artificial
  Barcode component
  misc_feature (33)..(34): n is a, c, g, or t
  misc_feature (43)..(44): n is a, c, g, or t
  misc_feature (53)..(54): n is a, c, g, or t
tttttttaagcagtggtatcaacgcagagtacnnaacgtgtcnncgagagatnntttttttttttttttttttttttttttttt

SEQ ID NO: 4441 - DNA, 84 bp, Artificial
  Barcode component
  misc_feature (33)..(34): n is a, c, g, or t
  misc_feature (43)..(44): n is a, c, g, or t
  misc_feature (53)..(54): n is a, c, g, or t
tttttttaagcagtggtatcaacgcagagtacnnaacgtgtcnnacagatggnntttttttttttttttttttttttttttttt

SEQ ID NO: 4442 - DNA, 84 bp, Artificial
  Barcode component
  misc_feature (33)..(34): n is a, c, g, or t
  misc_feature (43)..(44): n is a, c, g, or t
  misc_feature (53)..(54): n is a, c, g, or t
tttttttaagcagtggtatcaacgcagagtacnnaacgtgtcnnaggagtcanntttttttttttttttttttttttttttttt

SEQ ID NO: 4443 - DNA, 84 bp, Artificial
  Barcode component
  misc_feature (33)..(34): n is a, c, g, or t
  misc_feature (43)..(44): n is a, c, g, or t
  misc_feature (53)..(54): n is a, c, g, or t
tttttttaagcagtggtatcaacgcagagtacnnaacgtgtcnncgtgttacnntttttttttttttttttttttttttttttt

SEQ ID NO: 4444 - DNA, 84 bp, Artificial
  Barcode component
  misc_feature (33)..(34): n is a, c, g, or t
  misc_feature (43)..(44): n is a, c, g, or t
  misc_feature (53)..(54): n is a, c, g, or t
tttttttaagcagtggtatcaacgcagagtacnnaacgtgtcnntagtgtgcnntttttttttttttttttttttttttttttt

SEQ ID NO: 4445 - DNA, 84 bp, Artificial
  Barcode component
  misc_feature (33)..(34): n is a, c, g, or t
  misc_feature (43)..(44): n is a, c, g, or t
  misc_feature (53)..(54): n is a, c, g, or t
tttttttaagcagtggtatcaacgcagagtacnnaacgtgtcnnctcatgacnntttttttttttttttttttttttttttttt

SEQ ID NO: 4446 - DNA, 84 bp, Artificial
  Barcode component
  misc_feature (33)..(34): n is a, c, g, or t
  misc_feature (43)..(44): n is a, c, g, or t
  misc_feature (53)..(54): n is a, c, g, or t
tttttttaagcagtggtatcaacgcagagtacnnaacgtgtcnngtatccagnntttttttttttttttttttttttttttttt

SEQ ID NO: 4447 - DNA, 84 bp, Artificial
  Barcode component
  misc_feature (33)..(34): n is a, c, g, or t
  misc_feature (43)..(44): n is a, c, g, or t
  misc_feature (53)..(54): n is a, c, g, or t
tttttttaagcagtggtatcaacgcagagtacnnaacgtgtcnnacgcctatnntttttttttttttttttttttttttttttt

SEQ ID NO: 4448 - DNA, 84 bp, Artificial
  Barcode component
  misc_feature (33)..(34): n is a, c, g, or t
  misc_feature (43)..(44): n is a, c, g, or t
  misc_feature (53)..(54): n is a, c, g, or t
tttttttaagcagtggtatcaacgcagagtacnnaacgtgtcnnaacgacctnntttttttttttttttttttttttttttttt

SEQ ID NO: 4449 - DNA, 84 bp, Artificial
  Barcode component
  misc_feature (33)..(34): n is a, c, g, or t
  misc_feature (43)..(44): n is a, c, g, or t
  misc_feature (53)..(54): n is a, c, g, or t
tttttttaagcagtggtatcaacgcagagtacnnaacgtgtcnnatcaggctnntttttttttttttttttttttttttttttt

SEQ ID NO: 4450 - DNA, 84 bp, Artificial
  Barcode component
  misc_feature (33)..(34): n is a, c, g, or t
  misc_feature (43)..(44): n is a, c, g, or t
  misc_feature (53)..(54): n is a, c, g, or t
tttttttaagcagtggtatcaacgcagagtacnnaacgtgtcnncaagttcgnntttttttttttttttttttttttttttttt

SEQ ID NO: 4451 - DNA, 84 bp, Artificial
  Barcode component
  misc_feature (33)..(34): n is a, c, g, or t
  misc_feature (43)..(44): n is a, c, g, or t
  misc_feature (53)..(54): n is a, c, g, or t
tttttttaagcagtggtatcaacgcagagtacnnaacgtgtcnntagccaganntttttttttttttttttttttttttttttt

SEQ ID NO: 4452 - DNA, 84 bp, Artificial
  Barcode component
  misc_feature (33)..(34): n is a, c, g, or t
  misc_feature (43)..(44): n is a, c, g, or t
  misc_feature (53)..(54): n is a, c, g, or t
tttttttaagcagtggtatcaacgcagagtacnnaacgtgtcnncaatcacgnntttttttttttttttttttttttttttttt

SEQ ID NO: 4453 - DNA, 84 bp, Artificial
  Barcode component
  misc_feature (33)..(34): n is a, c, g, or t
  misc_feature (43)..(44): n is a, c, g, or t
  misc_feature (53)..(54): n is a, c, g, or t
tttttttaagcagtggtatcaacgcagagtacnnaacgtgtcnngcaacaagnntttttttttttttttttttttttttttttt

SEQ ID NO: 4454 - DNA, 84 bp, Artificial
  Barcode component
  misc_feature (33)..(34): n is a, c, g, or t
  misc_feature (43)..(44): n is a, c, g, or t
  misc_feature (53)..(54): n is a, c, g, or t
tttttttaagcagtggtatcaacgcagagtacnnaacgtgtcnncacgacaanntttttttttttttttttttttttttttttt

SEQ ID NO: 4455 - DNA, 84 bp, Artificial
  Barcode component
  misc_feature (33)..(34): n is a, c, g, or t
  misc_feature (43)..(44): n is a, c, g, or t
  misc_feature (53)..(54): n is a, c, g, or t
tttttttaagcagtggtatcaacgcagagtacnnaacgtgtcnntacggaganntttttttttttttttttttttttttttttt

SEQ ID NO: 4456 - DNA, 84 bp, Artificial
  Barcode component
  misc_feature (33)..(34): n is a, c, g, or t
  misc_feature (43)..(44): n is a, c, g, or t
  misc_feature (53)..(54): n is a, c, g, or t
tttttttaagcagtggtatcaacgcagagtacnnaacgtgtcnncgacaaganntttttttttttttttttttttttttttttt

SEQ ID NO: 4457 - DNA, 84 bp, Artificial
  Barcode component
  misc_feature (33)..(34): n is a, c, g, or t
  misc_feature (43)..(44): n is a, c, g, or t
  misc_feature (53)..(54): n is a, c, g, or t
tttttttaagcagtggtatcaacgcagagtacnnaacgtgtcnncgaagtganntttttttttttttttttttttttttttttt

SEQ ID NO: 4458 - DNA, 84 bp, Artificial
  Barcode component
  misc_feature (33)..(34): n is a, c, g, or t
  misc_feature (43)..(44): n is a, c, g, or t
  misc_feature (53)..(54): n is a, c, g, or t
tttttttaagcagtggtatcaacgcagagtacnnaacgtgtcnnagctggtanntttttttttttttttttttttttttttttt

SEQ ID NO: 4459 - DNA, 84 bp, Artificial
  Barcode component
  misc_feature (33)..(34): n is a, c, g, or t
  misc_feature (43)..(44): n is a, c, g, or t
  misc_feature (53)..(54): n is a, c, g, or t
tttttttaagcagtggtatcaacgcagagtacnnaacgtgtcnnaactaggcnntttttttttttttttttttttttttttttt

SEQ ID NO: 4460 - DNA, 84 bp, Artificial
  Barcode component
  misc_feature (33)..(34): n is a, c, g, or t
  misc_feature (43)..(44): n is a, c, g, or t
  misc_feature (53)..(54): n is a, c, g, or t
tttttttaagcagtggtatcaacgcagagtacnnaacgtgtcnncagcaagtnntttttttttttttttttttttttttttttt

SEQ ID NO: 4461 - DNA, 84 bp, Artificial
  Barcode component
  misc_feature (33)..(34): n is a, c, g, or t
  misc_feature (43)..(44): n is a, c, g, or t
  misc_feature (53)..(54): n is a, c, g, or t
tttttttaagcagtggtatcaacgcagagtacnnaacgtgtcnnacgaggtanntttttttttttttttttttttttttttttt

SEQ ID NO: 4462 - DNA, 84 bp, Artificial
  Barcode component
  misc_feature (33)..(34): n is a, c, g, or t
  misc_feature (43)..(44): n is a, c, g, or t
  misc_feature (53)..(54): n is a, c, g, or t
tttttttaagcagtggtatcaacgcagagtacnnaacgtgtcnncatcttccnntttttttttttttttttttttttttttttt

SEQ ID NO: 4463 - DNA, 84 bp, Artificial
  Barcode component
  misc_feature (33)..(34): n is a, c, g, or t
  misc_feature (43)..(44): n is a, c, g, or t
  misc_feature (53)..(54): n is a, c, g, or t
tttttttaagcagtggtatcaacgcagagtacnnaacgtgtcnncctgaatcnntttttttttttttttttttttttttttttt

SEQ ID NO: 4464 - DNA, 84 bp, Artificial
  Barcode component
  misc_feature (33)..(34): n is a, c, g, or t
  misc_feature (43)..(44): n is a, c, g, or t
  misc_feature (53)..(54): n is a, c, g, or t
tttttttaagcagtggtatcaacgcagagtacnnaacgtgtcnntgcagactnntttttttttttttttttttttttttttttt

SEQ ID NO: 4465 - DNA, 84 bp, Artificial
  Barcode component
  misc_feature (33)..(34): n is a, c, g, or t
  misc_feature (43)..(44): n is a, c, g, or t
  misc_feature (53)..(54): n is a, c, g, or t
tttttttaagcagtggtatcaacgcagagtacnnaacgtgtcnnagatgtggnntttttttttttttttttttttttttttttt

SEQ ID NO: 4466 - DNA, 84 bp, Artificial
  Barcode component
  misc_feature (33)..(34): n is a, c, g, or t
  misc_feature (43)..(44): n is a, c, g, or t
  misc_feature (53)..(54): n is a, c, g, or t
tttttttaagcagtggtatcaacgcagagtacnnaacgtgtcnnagttcgacnntttttttttttttttttttttttttttttt

SEQ ID NO: 4467 - DNA, 84 bp, Artificial
  Barcode component
  misc_feature (33)..(34): n is a, c, g, or t
  misc_feature (43)..(44): n is a, c, g, or t
  misc_feature (53)..(54): n is a, c, g, or t
tttttttaagcagtggtatcaacgcagagtacnnaacgtgtcnnacaacctcnntttttttttttttttttttttttttttttt

SEQ ID NO: 4468 - DNA, 84 bp, Artificial
  Barcode component
  misc_feature (33)..(34): n is a, c, g, or t
  misc_feature (43)..(44): n is a, c, g, or t
  misc_feature (53)..(54): n is a, c, g, or t
tttttttaagcagtggtatcaacgcagagtacnnaacgtgtcnncatggtagnntttttttttttttttttttttttttttttt

SEQ ID NO: 4469 - DNA, 84 bp, Artificial
  Barcode component
  misc_feature (33)..(34): n is a, c, g, or t
  misc_feature (43)..(44): n is a, c, g, or t
  misc_feature (53)..(54): n is a, c, g, or t
tttttttaagcagtggtatcaacgcagagtacnnaacgtgtcnncgtatctcnntttttttttttttttttttttttttttttt

SEQ ID NO: 4470 - DNA, 84 bp, Artificial
  Barcode component
  misc_feature (33)..(34): n is a, c, g, or t
  misc_feature (43)..(44): n is a, c, g, or t
  misc_feature (53)..(54): n is a, c, g, or t
tttttttaagcagtggtatcaacgcagagtacnnaacgtgtcnncctagttcnntttttttttttttttttttttttttttttt

SEQ ID NO: 4471 - DNA, 84 bp, Artificial
  Barcode component
  misc_feature (33)..(34): n is a, c, g, or t
  misc_feature (43)..(44): n is a, c, g, or t
  misc_feature (53)..(54): n is a, c, g, or t
tttttttaagcagtggtatcaacgcagagtacnnaacgtgtcnncaagagtcnntttttttttttttttttttttttttttttt

SEQ ID NO: 4472 - DNA, 84 bp, Artificial
  Barcode component
  misc_feature (33)..(34): n is a, c, g, or t
  misc_feature (43)..(44): n is a, c, g, or t
  misc_feature (53)..(54): n is a, c, g, or t
tttttttaagcagtggtatcaacgcagagtacnnggtcagaannaatcggcanntttttttttttttttttttttttttttttt

SEQ ID NO: 4473 - DNA, 84 bp, Artificial
  Barcode component
  misc_feature (33)..(34): n is a, c, g, or t
  misc_feature (43)..(44): n is a, c, g, or t
  misc_feature (53)..(54): n is a, c, g, or t
tttttttaagcagtggtatcaacgcagagtacnnggtcagaanntacggcatnntttttttttttttttttttttttttttttt

SEQ ID NO: 4474 - DNA, 84 bp, Artificial
  Barcode component
  misc_feature (33)..(34): n is a, c, g, or t
  misc_feature (43)..(44): n is a, c, g, or t
  misc_feature (53)..(54): n is a, c, g, or t
tttttttaagcagtggtatcaacgcagagtacnnggtcagaannttggatcgnntttttttttttttttttttttttttttttt

SEQ ID NO: 4475 - DNA, 84 bp, Artificial
  Barcode component
  misc_feature (33)..(34): n is a, c, g, or t
  misc_feature (43)..(44): n is a, c, g, or t
  misc_feature (53)..(54): n is a, c, g, or t
tttttttaagcagtggtatcaacgcagagtacnnggtcagaanntggaacganntttttttttttttttttttttttttttttt

SEQ ID NO: 4476 - DNA, 84 bp, Artificial
  Barcode component
  misc_feature (33)..(34): n is a, c, g, or t
  misc_feature (43)..(44): n is a, c, g, or t
  misc_feature (53)..(54): n is a, c, g, or t
tttttttaagcagtggtatcaacgcagagtacnnggtcagaannggcaatcanntttttttttttttttttttttttttttttt

SEQ ID NO: 4477 - DNA, 84 bp, Artificial
  Barcode component
  misc_feature (33)..(34): n is a, c, g, or t
  misc_feature (43)..(44): n is a, c, g, or t
  misc_feature (53)..(54): n is a, c, g, or t
tttttttaagcagtggtatcaacgcagagtacnnggtcagaanngaatccganntttttttttttttttttttttttttttttt

SEQ ID NO: 4478 - DNA, 84 bp, Artificial
  Barcode component
  misc_feature (33)..(34): n is a, c, g, or t
  misc_feature (43)..(44): n is a, c, g, or t
  misc_feature (53)..(54): n is a, c, g, or t
tttttttaagcagtggtatcaacgcagagtacnnggtcagaannttacggtgnntttttttttttttttttttttttttttttt

SEQ ID NO: 4479 - DNA, 84 bp, Artificial
  Barcode component
  misc_feature (33)..(34): n is a, c, g, or t
  misc_feature (43)..(44): n is a, c, g, or t
  misc_feature (53)..(54): n is a, c, g, or t
tttttttaagcagtggtatcaacgcagagtacnnggtcagaanncatatcggnntttttttttttttttttttttttttttttt

SEQ ID NO: 4480 - DNA, 84 bp, Artificial
  Barcode component
  misc_feature (33)..(34): n is a, c, g, or t
  misc_feature (43)..(44): n is a, c, g, or t
  misc_feature (53)..(54): n is a, c, g, or t
tttttttaagcagtggtatcaacgcagagtacnnggtcagaanncttcggtanntttttttttttttttttttttttttttttt

SEQ ID NO: 4481 - DNA, 84 bp, Artificial
  Barcode component
  misc_feature (33)..(34): n is a, c, g, or t
  misc_feature (43)..(44): n is a, c, g, or t
  misc_feature (53)..(54): n is a, c, g, or t
tttttttaagcagtggtatcaacgcagagtacnnggtcagaanntcctaacgnntttttttttttttttttttttttttttttt

SEQ ID NO: 4482 - DNA, 84 bp, Artificial
  Barcode component
  misc_feature (33)..(34): n is a, c, g, or t
  misc_feature (43)..(44): n is a, c, g, or t
  misc_feature (53)..(54): n is a, c, g, or t
tttttttaagcagtggtatcaacgcagagtacnnggtcagaanngtaagccanntttttttttttttttttttttttttttttt

SEQ ID NO: 4483 - DNA, 84 bp, Artificial
  Barcode component
  misc_feature (33)..(34): n is a, c, g, or t
  misc_feature (43)..(44): n is a, c, g, or t
  misc_feature (53)..(54): n is a, c, g, or t
tttttttaagcagtggtatcaacgcagagtacnnggtcagaanntaaggtggnntttttttttttttttttttttttttttttt

SEQ ID NO: 4484 - DNA, 84 bp, Artificial
  Barcode component
  misc_feature (33)..(34): n is a, c, g, or t
  misc_feature (43)..(44): n is a, c, g, or t
  misc_feature (53)..(54): n is a, c, g, or t
tttttttaagcagtggtatcaacgcagagtacnnggtcagaannggtaagctnntttttttttttttttttttttttttttttt

SEQ ID NO: 4485 - DNA, 84 bp, Artificial
  Barcode component
  misc_feature (33)..(34): n is a, c, g, or t
  misc_feature (43)..(44): n is a, c, g, or t
  misc_feature (53)..(54): n is a, c, g, or t
tttttttaagcagtggtatcaacgcagagtacnnggtcagaanntgtgtcganntttttttttttttttttttttttttttttt

SEQ ID NO: 4486 - DNA, 84 bp, Artificial
  Barcode component
  misc_feature (33)..(34): n is a, c, g, or t
  misc_feature (43)..(44): n is a, c, g, or t
  misc_feature (53)..(54): n is a, c, g, or t
tttttttaagcagtggtatcaacgcagagtacnnggtcagaanngagcatganntttttttttttttttttttttttttttttt

SEQ ID NO: 4487 - DNA, 84 bp, Artificial
  Barcode component
  misc_feature (33)..(34): n is a, c, g, or t
  misc_feature (43)..(44): n is a, c, g, or t
  misc_feature (53)..(54): n is a, c, g, or t
tttttttaagcagtggtatcaacgcagagtacnnggtcagaanntcgaagtcnntttttttttttttttttttttttttttttt

SEQ ID NO: 4488 - DNA, 84 bp, Artificial
  Barcode component
  misc_feature (33)..(34): n is a, c, g, or t
  misc_feature (43)..(44): n is a, c, g, or t
  misc_feature (53)..(54): n is a, c, g, or t
tttttttaagcagtggtatcaacgcagagtacnnggtcagaannggtgaacanntttttttttttttttttttttttttttttt

SEQ ID NO: 4489 - DNA, 84 bp, Artificial
  Barcode component
  misc_feature (33)..(34): n is a, c, g, or t
  misc_feature (43)..(44): n is a, c, g, or t
  misc_feature (53)..(54): n is a, c, g, or t
tttttttaagcagtggtatcaacgcagagtacnnggtcagaannacatgcacnntttttttttttttttttttttttttttttt

SEQ ID NO: 4490 - DNA, 84 bp, Artificial
  Barcode component
  misc_feature (33)..(34): n is a, c, g, or t
  misc_feature (43)..(44): n is a, c, g, or t
  misc_feature (53)..(54): n is a, c, g, or t
tttttttaagcagtggtatcaacgcagagtacnnggtcagaannccaacagtnntttttttttttttttttttttttttttttt

SEQ ID NO: 4491 - DNA, 84 bp, Artificial
  Barcode component
  misc_feature (33)..(34): n is a, c, g, or t
  misc_feature (43)..(44): n is a, c, g, or t
  misc_feature (53)..(54): n is a, c, g, or t
tttttttaagcagtggtatcaacgcagagtacnnggtcagaannagaacagcnntttttttttttttttttttttttttttttt

SEQ ID NO: 4492 - DNA, 84 bp, Artificial
  Barcode component
  misc_feature (33)..(34): n is a, c, g, or t
  misc_feature (43)..(44): n is a, c, g, or t
  misc_feature (53)..(54): n is a, c, g, or t
tttttttaagcagtggtatcaacgcagagtacnnggtcagaanngaacacgtnntttttttttttttttttttttttttttttt

SEQ ID NO: 4493 - DNA, 84 bp, Artificial
  Barcode component
  misc_feature (33)..(34): n is a, c, g, or t
  misc_feature (43)..(44): n is a, c, g, or t
  misc_feature (53)..(54): n is a, c, g, or t
tttttttaagcagtggtatcaacgcagagtacnnggtcagaannggtcttcanntttttttttttttttttttttttttttttt

SEQ ID NO: 4494 - DNA, 84 bp, Artificial
  Barcode component
  misc_feature (33)..(34): n is a, c, g, or t
  misc_feature (43)..(44): n is a, c, g, or t
  misc_feature (53)..(54): n is a, c, g, or t
tttttttaagcagtggtatcaacgcagagtacnnggtcagaannaggttcagnntttttttttttttttttttttttttttttt

SEQ ID NO: 4495 - DNA, 84 bp, Artificial
  Barcode component
  misc_feature (33)..(34): n is a, c, g, or t
  misc_feature (43)..(44): n is a, c, g, or t
  misc_feature (53)..(54): n is a, c, g, or t
tttttttaagcagtggtatcaacgcagagtacnnggtcagaannctagagcanntttttttttttttttttttttttttttttt

SEQ ID NO: 4496 - DNA, 84 bp, Artificial
  Barcode component
  misc_feature (33)..(34): n is a, c, g, or t
  misc_feature (43)..(44): n is a, c, g, or t
  misc_feature (53)..(54): n is a, c, g, or t
tttttttaagcagtggtatcaacgcagagtacnnggtcagaanncttctagcnntttttttttttttttttttttttttttttt

SEQ ID NO: 4497 - DNA, 84 bp, Artificial
  Barcode component
  misc_feature (33)..(34): n is a, c, g, or t
  misc_feature (43)..(44): n is a, c, g, or t
  misc_feature (53)..(54): n is a, c, g, or t
tttttttaagcagtggtatcaacgcagagtacnnggtcagaanngagtaacgnntttttttttttttttttttttttttttttt

SEQ ID NO: 4498 - DNA, 84 bp, Artificial
  Barcode component
  misc_feature (33)..(34): n is a, c, g, or t
  misc_feature (43)..(44): n is a, c, g, or t
  misc_feature (53)..(54): n is a, c, g, or t
tttttttaagcagtggtatcaacgcagagtacnnggtcagaannctaagaggnntttttttttttttttttttttttttttttt

SEQ ID NO: 4499 - DNA, 84 bp, Artificial
  Barcode component
  misc_feature (33)..(34): n is a, c, g, or t
  misc_feature (43)..(44): n is a, c, g, or t
  misc_feature (53)..(54): n is a, c, g, or t
tttttttaagcagtggtatcaacgcagagtacnnggtcagaannacgtgtagnntttttttttttttttttttttttttttttt

SEQ ID NO: 4500 - DNA, 84 bp, Artificial
  Barcode component
  misc_feature (33)..(34): n is a, c, g, or t
  misc_feature (43)..(44): n is a, c, g, or t
  misc_feature (53)..(54): n is a, c, g, or t
tttttttaagcagtggtatcaacgcagagtacnnggtcagaannactacaggnntttttttttttttttttttttttttttttt

SEQ ID NO: 4501 - DNA, 84 bp, Artificial
  Barcode component
  misc_feature (33)..(34): n is a, c, g, or t
  misc_feature (43)..(44): n is a, c, g, or t
  misc_feature (53)..(54): n is a, c, g, or t
tttttttaagcagtggtatcaacgcagagtacnnggtcagaanntacaggtcnntttttttttttttttttttttttttttttt

SEQ ID NO: 4502 - DNA, 84 bp, Artificial
  Barcode component
  misc_feature (33)..(34): n is a, c, g, or t
  misc_feature (43)..(44): n is a, c, g, or t
  misc_feature (53)..(54): n is a, c, g, or t
tttttttaagcagtggtatcaacgcagagtacnnggtcagaannctcacatgnntttttttttttttttttttttttttttttt

SEQ ID NO: 4503 - DNA, 84 bp, Artificial
  Barcode component
  misc_feature (33)..(34): n is a, c, g, or t
  misc_feature (43)..(44): n is a, c, g, or t
  misc_feature (53)..(54): n is a, c, g, or t
tttttttaagcagtggtatcaacgcagagtacnnggtcagaannactaggagnntttttttttttttttttttttttttttttt

SEQ ID NO: 4504 - DNA, 84 bp, Artificial
  Barcode component
  misc_feature (33)..(34): n is a, c, g, or t
  misc_feature (43)..(44): n is a, c, g, or t
  misc_feature (53)..(54): n is a, c, g, or t
tttttttaagcagtggtatcaacgcagagtacnnggtcagaannccatagganntttttttttttttttttttttttttttttt

SEQ ID NO: 4505 - DNA, 84 bp, Artificial
  Barcode component
  misc_feature (33)..(34): n is a, c, g, or t
  misc_feature (43)..(44): n is a, c, g, or t
  misc_feature (53)..(54): n is a, c, g, or t
tttttttaagcagtggtatcaacgcagagtacnnggtcagaannggagaatcnntttttttttttttttttttttttttttttt

SEQ ID NO: 4506 - DNA, 84 bp, Artificial
  Barcode component
  misc_feature (33)..(34): n is a, c, g, or t
  misc_feature (43)..(44): n is a, c, g, or t
  misc_feature (53)..(54): n is a, c, g, or t
tttttttaagcagtggtatcaacgcagagtacnnggtcagaanngccaagaanntttttttttttttttttttttttttttttt

SEQ ID NO: 4507 - DNA, 84 bp, Artificial
  Barcode component
  misc_feature (33)..(34): n is a, c, g, or t
  misc_feature (43)..(44): n is a, c, g, or t
  misc_feature (53)..(54): n is a, c, g, or t
tttttttaagcagtggtatcaacgcagagtacnnggtcagaannaaggcaagnntttttttttttttttttttttttttttttt

SEQ ID NO: 4508 - DNA, 84 bp, Artificial
  Barcode component
  misc_feature (33)..(34): n is a, c, g, or t
  misc_feature (43)..(44): n is a, c, g, or t
  misc_feature (53)..(54): n is a, c, g, or t
tttttttaagcagtggtatcaacgcagagtacnnggtcagaannaatgtcgcnntttttttttttttttttttttttttttttt

SEQ ID NO: 4509 - DNA, 84 bp, Artificial
  Barcode component
  misc_feature (33)..(34): n is a, c, g, or t
  misc_feature (43)..(44): n is a, c, g, or t
  misc_feature (53)..(54): n is a, c, g, or t
tttttttaagcagtggtatcaacgcagagtacnnggtcagaannatggaaccnntttttttttttttttttttttttttttttt

SEQ ID NO: 4510 - DNA, 84 bp, Artificial
  Barcode component
  misc_feature (33)..(34): n is a, c, g, or t
  misc_feature (43)..(44): n is a, c, g, or t
  misc_feature (53)..(54): n is a, c, g, or t
tttttttaagcagtggtatcaacgcagagtacnnggtcagaannagaggcatnntttttttttttttttttttttttttttttt

SEQ ID NO: 4511 - DNA, 84 bp, Artificial
  Barcode component
  misc_feature (33)..(34): n is a, c, g, or t
  misc_feature (43)..(44): n is a, c, g, or t
  misc_feature (53)..(54): n is a, c, g, or t
tttttttaagcagtggtatcaacgcagagtacnnggtcagaanntgcatagcnntttttttttttttttttttttttttttttt

SEQ ID NO: 4512 - DNA, 84 bp, Artificial
  Barcode component
  misc_feature (33)..(34): n is a, c, g, or t
  misc_feature (43)..(44): n is a, c, g, or t
  misc_feature (53)..(54): n is a, c, g, or t
tttttttaagcagtggtatcaacgcagagtacnnggtcagaannctaacgganntttttttttttttttttttttttttttttt

SEQ ID NO: 4513 - DNA, 84 bp, Artificial
  Barcode component
  misc_feature (33)..(34): n is a, c, g, or t
  misc_feature (43)..(44): n is a, c, g, or t
  misc_feature (53)..(54): n is a, c, g, or t
tttttttaagcagtggtatcaacgcagagtacnnggtcagaanntatcgaggnntttttttttttttttttttttttttttttt

SEQ ID NO: 4514 - DNA, 84 bp, Artificial
  Barcode component
  misc_feature (33)..(34): n is a, c, g, or t
  misc_feature (43)..(44): n is a, c, g, or t
  misc_feature (53)..(54): n is a, c, g, or t
tttttttaagcagtggtatcaacgcagagtacnnggtcagaanncatagcctnntttttttttttttttttttttttttttttt

SEQ ID NO: 4515 - DNA, 84 bp, Artificial
  Barcode component
  misc_feature (33)..(34): n is a, c, g, or t
  misc_feature (43)..(44): n is a, c, g, or t
  misc_feature (53)..(54): n is a, c, g, or t
tttttttaagcagtggtatcaacgcagagtacnnggtcagaannatcgagacnntttttttttttttttttttttttttttttt

SEQ ID NO: 4516 - DNA, 84 bp, Artificial
  Barcode component
  misc_feature (33)..(34): n is a, c, g, or t
  misc_feature (43)..(44): n is a, c, g, or t
  misc_feature (53)..(54): n is a, c, g, or t
tttttttaagcagtggtatcaacgcagagtacnnggtcagaannggaagagtnntttttttttttttttttttttttttttttt

SEQ ID NO: 4517 - DNA, 84 bp, Artificial
  Barcode component
  misc_feature (33)..(34): n is a, c, g, or t
  misc_feature (43)..(44): n is a, c, g, or t
  misc_feature (53)..(54): n is a, c, g, or t
tttttttaagcagtggtatcaacgcagagtacnnggtcagaannccaagtagnntttttttttttttttttttttttttttttt

SEQ ID NO: 4518 - DNA, 84 bp, Artificial
  Barcode component
  misc_feature (33)..(34): n is a, c, g, or t
  misc_feature (43)..(44): n is a, c, g, or t
  misc_feature (53)..(54): n is a, c, g, or t
tttttttaagcagtggtatcaacgcagagtacnnggtcagaannctgaacagnntttttttttttttttttttttttttttttt

SEQ ID NO: 4519 - DNA, 84 bp, Artificial
  Barcode component
  misc_feature (33)..(34): n is a, c, g, or t
  misc_feature (43)..(44): n is a, c, g, or t
  misc_feature (53)..(54): n is a, c, g, or t
tttttttaagcagtggtatcaacgcagagtacnnggtcagaanngtaggttcnntttttttttttttttttttttttttttttt

SEQ ID NO: 4520 - DNA, 84 bp, Artificial
  Barcode component
  misc_feature (33)..(34): n is a, c, g, or t
  misc_feature (43)..(44): n is a, c, g, or t
  misc_feature (53)..(54): n is a, c, g, or t
tttttttaagcagtggtatcaacgcagagtacnnggtcagaanngtatggacnntttttttttttttttttttttttttttttt

SEQ ID NO: 4521 - DNA, 84 bp, Artificial
  Barcode component
  misc_feature (33)..(34): n is a, c, g, or t
  misc_feature (43)..(44): n is a, c, g, or t
  misc_feature (53)..(54): n is a, c, g, or t
tttttttaagcagtggtatcaacgcagagtacnnggtcagaanntcgcaacanntttttttttttttttttttttttttttttt

SEQ ID NO: 4522 - DNA, 84 bp, Artificial
  Barcode component
  misc_feature (33)..(34): n is a, c, g, or t
  misc_feature (43)..(44): n is a, c, g, or t
  misc_feature (53)..(54): n is a, c, g, or t
tttttttaagcagtggtatcaacgcagagtacnnggtcagaannccgctaatnntttttttttttttttttttttttttttttt

SEQ ID NO: 4523 - DNA, 84 bp, Artificial
  Barcode component
  misc_feature (33)..(34): n is a, c, g, or t
  misc_feature (43)..(44): n is a, c, g, or t
  misc_feature (53)..(54): n is a, c, g, or t
tttttttaagcagtggtatcaacgcagagtacnnggtcagaanngattcgcanntttttttttttttttttttttttttttttt

SEQ ID NO: 4524 - DNA, 84 bp, Artificial
  Barcode component
  misc_feature (33)..(34): n is a, c, g, or t
  misc_feature (43)..(44): n is a, c, g, or t
  misc_feature (53)..(54): n is a, c, g, or t
tttttttaagcagtggtatcaacgcagagtacnnggtcagaanncgatggaanntttttttttttttttttttttttttttttt

SEQ ID NO: 4525 - DNA, 84 bp, Artificial
  Barcode component
  misc_feature (33)..(34): n is a, c, g, or t
  misc_feature (43)..(44): n is a, c, g, or t
  misc_feature (53)..(54): n is a, c, g, or t
tttttttaagcagtggtatcaacgcagagtacnnggtcagaannagcaagganntttttttttttttttttttttttttttttt

SEQ ID NO: 4526 - DNA, 84 bp, Artificial
  Barcode component
  misc_feature (33)..(34): n is a, c, g, or t
  misc_feature (43)..(44): n is a, c, g, or t
  misc_feature (53)..(54): n is a, c, g, or t
tttttttaagcagtggtatcaacgcagagtacnnggtcagaanncgtagcaanntttttttttttttttttttttttttttttt

SEQ ID NO: 4527 - DNA, 84 bp, Artificial
  Barcode component
  misc_feature (33)..(34): n is a, c, g, or t
  misc_feature (43)..(44): n is a, c, g, or t
  misc_feature (53)..(54): n is a, c, g, or t
tttttttaagcagtggtatcaacgcagagtacnnggtcagaanntggcagtanntttttttttttttttttttttttttttttt

SEQ ID NO: 4528 - DNA, 84 bp, Artificial
  Barcode component
  misc_feature (33)..(34): n is a, c, g, or t
  misc_feature (43)..(44): n is a, c, g, or t
  misc_feature (53)..(54): n is a, c, g, or t
tttttttaagcagtggtatcaacgcagagtacnnggtcagaanncggtagttnntttttttttttttttttttttttttttttt

SEQ ID NO: 4529 - DNA, 84 bp, Artificial
  Barcode component
  misc_feature (33)..(34): n is a, c, g, or t
  misc_feature (43)..(44): n is a, c, g, or t
  misc_feature (53)..(54): n is a, c, g, or t
tttttttaagcagtggtatcaacgcagagtacnnggtcagaanntgacttcgnntttttttttttttttttttttttttttttt

SEQ ID NO: 4530 - DNA, 84 bp, Artificial
  Barcode component
  misc_feature (33)..(34): n is a, c, g, or t
  misc_feature (43)..(44): n is a, c, g, or t
  misc_feature (53)..(54): n is a, c, g, or t
tttttttaagcagtggtatcaacgcagagtacnnggtcagaanngagtgcaanntttttttttttttttttttttttttttttt

SEQ ID NO: 4531 - DNA, 84 bp, Artificial
  Barcode component
  misc_feature (33)..(34): n is a, c, g, or t
  misc_feature (43)..(44): n is a, c, g, or t
  misc_feature (53)..(54): n is a, c, g, or t
tttttttaagcagtggtatcaacgcagagtacnnggtcagaannacggtaacnntttttttttttttttttttttttttttttt

SEQ ID NO: 4532 - DNA, 84 bp, Artificial
  Barcode component
  misc_feature (33)..(34): n is a, c, g, or t
  misc_feature (43)..(44): n is a, c, g, or t
  misc_feature (53)..(54): n is a, c, g, or t
tttttttaagcagtggtatcaacgcagagtacnnggtcagaannaagtggtgnntttttttttttttttttttttttttttttt

SEQ ID NO: 4533 - DNA, 84 bp, Artificial
  Barcode component
  misc_feature (33)..(34): n is a, c, g, or t
  misc_feature (43)..(44): n is a, c, g, or t
  misc_feature (53)..(54): n is a, c, g, or t
tttttttaagcagtggtatcaacgcagagtacnnggtcagaannggagacaanntttttttttttttttttttttttttttttt

SEQ ID NO: 4534 - DNA, 84 bp, Artificial
  Barcode component
  misc_feature (33)..(34): n is a, c, g, or t
  misc_feature (43)..(44): n is a, c, g, or t
  misc_feature (53)..(54): n is a, c, g, or t
tttttttaagcagtggtatcaacgcagagtacnnggtcagaanntcaaggacnntttttttttttttttttttttttttttttt

SEQ ID NO: 4535 - DNA, 84 bp, Artificial
  Barcode component
  misc_feature (33)..(34): n is a, c, g, or t
  misc_feature (43)..(44): n is a, c, g, or t
  misc_feature (53)..(54): n is a, c, g, or t
tttttttaagcagtggtatcaacgcagagtacnnggtcagaannaagagagcnntttttttttttttttttttttttttttttt

SEQ ID NO: 4536 - DNA, 84 bp, Artificial
  Barcode component
  misc_feature (33)..(34): n is a, c, g, or t
  misc_feature (43)..(44): n is a, c, g, or t
  misc_feature (53)..(54): n is a, c, g, or t
tttttttaagcagtggtatcaacgcagagtacnnggtcagaanncgagagatnntttttttttttttttttttttttttttttt

SEQ ID NO: 4537 - DNA, 84 bp, Artificial
  Barcode component
  misc_feature (33)..(34): n is a, c, g, or t
  misc_feature (43)..(44): n is a, c, g, or t
  misc_feature (53)..(54): n is a, c, g, or t
tttttttaagcagtggtatcaacgcagagtacnnggtcagaannacagatggnntttttttttttttttttttttttttttttt

SEQ ID NO: 4538 - DNA, 84 bp, Artificial
  Barcode component
  misc_feature (33)..(34): n is a, c, g, or t
  misc_feature (43)..(44): n is a, c, g, or t
  misc_feature (53)..(54): n is a, c, g, or t
tttttttaagcagtggtatcaacgcagagtacnnggtcagaannaggagtcanntttttttttttttttttttttttttttttt

SEQ ID NO: 4539 - DNA, 84 bp, Artificial
  Barcode component
  misc_feature (33)..(34): n is a, c, g, or t
  misc_feature (43)..(44): n is a, c, g, or t
  misc_feature (53)..(54): n is a, c, g, or t
tttttttaagcagtggtatcaacgcagagtacnnggtcagaanncgtgttacnntttttttttttttttttttttttttttttt

SEQ ID NO: 4540 - DNA, 84 bp, Artificial
  Barcode component
  misc_feature (33)..(34): n is a, c, g, or t
  misc_feature (43)..(44): n is a, c, g, or t
  misc_feature (53)..(54): n is a, c, g, or t
tttttttaagcagtggtatcaacgcagagtacnnggtcagaanntagtgtgcnntttttttttttttttttttttttttttttt

SEQ ID NO: 4541 - DNA, 84 bp, Artificial
  Barcode component
  misc_feature (33)..(34): n is a, c, g, or t
  misc_feature (43)..(44): n is a, c, g, or t
  misc_feature (53)..(54): n is a, c, g, or t
tttttttaagcagtggtatcaacgcagagtacnnggtcagaannctcatgacnntttttttttttttttttttttttttttttt

SEQ ID NO: 4542 - DNA, 84 bp, Artificial
  Barcode component
  misc_feature (33)..(34): n is a, c, g, or t
  misc_feature (43)..(44): n is a, c, g, or t
  misc_feature (53)..(54): n is a, c, g, or t
tttttttaagcagtggtatcaacgcagagtacnnggtcagaanngtatccagnntttttttttttttttttttttttttttttt

SEQ ID NO: 4543 - DNA, 84 bp, Artificial
  Barcode component
  misc_feature (33)..(34): n is a, c, g, or t
  misc_feature (43)..(44): n is a, c, g, or t
  misc_feature (53)..(54): n is a, c, g, or t
tttttttaagcagtggtatcaacgcagagtacnnggtcagaannacgcctatnntttttttttttttttttttttttttttttt

SEQ ID NO: 4544 - DNA, 84 bp, Artificial
  Barcode component
  misc_feature (33)..(34): n is a, c, g, or t
  misc_feature (43)..(44): n is a, c, g, or t
  misc_feature (53)..(54): n is a, c, g, or t
tttttttaagcagtggtatcaacgcagagtacnnggtcagaannaacgacctnntttttttttttttttttttttttttttttt

SEQ ID NO: 4545 - DNA, 84 bp, Artificial
  Barcode component
  misc_feature (33)..(34): n is a, c, g, or t
  misc_feature (43)..(44): n is a, c, g, or t
  misc_feature (53)..(54): n is a, c, g, or t
tttttttaagcagtggtatcaacgcagagtacnnggtcagaannatcaggctnntttttttttttttttttttttttttttttt

SEQ ID NO: 4546 - DNA, 84 bp, Artificial
  Barcode component
  misc_feature (33)..(34): n is a, c, g, or t
  misc_feature (43)..(44): n is a, c, g, or t
  misc_feature (53)..(54): n is a, c, g, or t
tttttttaagcagtggtatcaacgcagagtacnnggtcagaanncaagttcgnntttttttttttttttttttttttttttttt

SEQ ID NO: 4547 - DNA, 84 bp, Artificial
  Barcode component
  misc_feature (33)..(34): n is a, c, g, or t
  misc_feature (43)..(44): n is a, c, g, or t
  misc_feature (53)..(54): n is a, c, g, or t
tttttttaagcagtggtatcaacgcagagtacnnggtcagaanntagccaganntttttttttttttttttttttttttttttt

SEQ ID NO: 4548 - DNA, 84 bp, Artificial
  Barcode component
  misc_feature (33)..(34): n is a, c, g, or t
  misc_feature (43)..(44): n is a, c, g, or t
  misc_feature (53)..(54): n is a, c, g, or t
tttttttaagcagtggtatcaacgcagagtacnnggtcagaanncaatcacgnntttttttttttttttttttttttttttttt

SEQ ID NO: 4549 - DNA, 84 bp, Artificial
  Barcode component
  misc_feature (33)..(34): n is a, c, g, or t
  misc_feature (43)..(44): n is a, c, g, or t
  misc_feature (53)..(54): n is a, c, g, or t
tttttttaagcagtggtatcaacgcagagtacnnggtcagaanngcaacaagnntttttttttttttttttttttttttttttt

SEQ ID NO: 4550 - DNA, 84 bp, Artificial
  Barcode component
  misc_feature (33)..(34): n is a, c, g, or t
  misc_feature (43)..(44): n is a, c, g, or t
  misc_feature (53)..(54): n is a, c, g, or t
tttttttaagcagtggtatcaacgcagagtacnnggtcagaanncacgacaanntttttttttttttttttttttttttttttt

SEQ ID NO: 4551 - DNA, 84 bp, Artificial
  Barcode component
  misc_feature (33)..(34): n is a, c, g, or t
  misc_feature (43)..(44): n is a, c, g, or t
  misc_feature (53)..(54): n is a, c, g, or t
tttttttaagcagtggtatcaacgcagagtacnnggtcagaanntacggaganntttttttttttttttttttttttttttttt

SEQ ID NO: 4552 - DNA, 84 bp, Artificial
  Barcode component
  misc_feature (33)..(34): n is a, c, g, or t
  misc_feature (43)..(44): n is a, c, g, or t
  misc_feature (53)..(54): n is a, c, g, or t
tttttttaagcagtggtatcaacgcagagtacnnggtcagaanncgacaaganntttttttttttttttttttttttttttttt

SEQ ID NO: 4553 - DNA, 84 bp, Artificial
  Barcode component
  misc_feature (33)..(34): n is a, c, g, or t
  misc_feature (43)..(44): n is a, c, g, or t
  misc_feature (53)..(54): n is a, c, g, or t
tttttttaagcagtggtatcaacgcagagtacnnggtcagaanncgaagtganntttttttttttttttttttttttttttttt

SEQ ID NO: 4554 - DNA, 84 bp, Artificial
  Barcode component
  misc_feature (33)..(34): n is a, c, g, or t
  misc_feature (43)..(44): n is a, c, g, or t
  misc_feature (53)..(54): n is a, c, g, or t
tttttttaagcagtggtatcaacgcagagtacnnggtcagaannagctggtanntttttttttttttttttttttttttttttt

SEQ ID NO: 4555 - DNA, 84 bp, Artificial
  Barcode component
  misc_feature (33)..(34): n is a, c, g, or t
  misc_feature (43)..(44): n is a, c, g, or t
  misc_feature (53)..(54): n is a, c, g, or t
tttttttaagcagtggtatcaacgcagagtacnnggtcagaannaactaggcnntttttttttttttttttttttttttttttt

SEQ ID NO: 4556 - DNA, 84 bp, Artificial
  Barcode component
  misc_feature (33)..(34): n is a, c, g, or t
  misc_feature (43)..(44): n is a, c, g, or t
  misc_feature (53)..(54): n is a, c, g, or t
tttttttaagcagtggtatcaacgcagagtacnnggtcagaanncagcaagtnntttttttttttttttttttttttttttttt

SEQ ID NO: 4557 - DNA, 84 bp, Artificial
  Barcode component
  misc_feature (33)..(34): n is a, c, g, or t
  misc_feature (43)..(44): n is a, c, g, or t
  misc_feature (53)..(54): n is a, c, g, or t
tttttttaagcagtggtatcaacgcagagtacnnggtcagaannacgaggtanntttttttttttttttttttttttttttttt

SEQ ID NO: 4558 - DNA, 84 bp, Artificial
  Barcode component
  misc_feature (33)..(34): n is a, c, g, or t
  misc_feature (43)..(44): n is a, c, g, or t
  misc_feature (53)..(54): n is a, c, g, or t
tttttttaagcagtggtatcaacgcagagtacnnggtcagaanncatcttccnntttttttttttttttttttttttttttttt

SEQ ID NO: 4559 - DNA, 84 bp, Artificial
  Barcode component
  misc_feature (33)..(34): n is a, c, g, or t
  misc_feature (43)..(44): n is a, c, g, or t
  misc_feature (53)..(54): n is a, c, g, or t
tttttttaagcagtggtatcaacgcagagtacnnggtcagaanncctgaatcnntttttttttttttttttttttttttttttt

SEQ ID NO: 4560 - DNA, 84 bp, Artificial
  Barcode component
  misc_feature (33)..(34): n is a, c, g, or t
  misc_feature (43)..(44): n is a, c, g, or t
  misc_feature (53)..(54): n is a, c, g, or t
tttttttaagcagtggtatcaacgcagagtacnnggtcagaanntgcagactnntttttttttttttttttttttttttttttt

SEQ ID NO: 4561 - DNA, 84 bp, Artificial
  Barcode component
  misc_feature (33)..(34): n is a, c, g, or t
  misc_feature (43)..(44): n is a, c, g, or t
  misc_feature (53)..(54): n is a, c, g, or t
tttttttaagcagtggtatcaacgcagagtacnnggtcagaannagatgtggnntttttttttttttttttttttttttttttt

SEQ ID NO: 4562 - DNA, 84 bp, Artificial
  Barcode component
  misc_feature (33)..(34): n is a, c, g, or t
  misc_feature (43)..(44): n is a, c, g, or t
  misc_feature (53)..(54): n is a, c, g, or t
tttttttaagcagtggtatcaacgcagagtacnnggtcagaannagttcgacnntttttttttttttttttttttttttttttt

SEQ ID NO: 4563 - DNA, 84 bp, Artificial
  Barcode component
  misc_feature (33)..(34): n is a, c, g, or t
  misc_feature (43)..(44): n is a, c, g, or t
  misc_feature (53)..(54): n is a, c, g, or t
tttttttaagcagtggtatcaacgcagagtacnnggtcagaannacaacctcnntttttttttttttttttttttttttttttt

SEQ ID NO: 4564 - DNA, 84 bp, Artificial
  Barcode component
  misc_feature (33)..(34): n is a, c, g, or t
  misc_feature (43)..(44): n is a, c, g, or t
  misc_feature (53)..(54): n is a, c, g, or t
tttttttaagcagtggtatcaacgcagagtacnnggtcagaanncatggtagnntttttttttttttttttttttttttttttt

SEQ ID NO: 4565 - DNA, 84 bp, Artificial
  Barcode component
  misc_feature (33)..(34): n is a, c, g, or t
  misc_feature (43)..(44): n is a, c, g, or t
  misc_feature (53)..(54): n is a, c, g, or t
tttttttaagcagtggtatcaacgcagagtacnnggtcagaanncgtatctcnntttttttttttttttttttttttttttttt

SEQ ID NO: 4566 - DNA, 84 bp, Artificial
  Barcode component
  misc_feature (33)..(34): n is a, c, g, or t
  misc_feature (43)..(44): n is a, c, g, or t
  misc_feature (53)..(54): n is a, c, g, or t
tttttttaagcagtggtatcaacgcagagtacnnggtcagaanncctagttcnntttttttttttttttttttttttttttttt

SEQ ID NO: 4567 - DNA, 84 bp, Artificial
  Barcode component
  misc_feature (33)..(34): n is a, c, g, or t
  misc_feature (43)..(44): n is a, c, g, or t
  misc_feature (53)..(54): n is a, c, g, or t
tttttttaagcagtggtatcaacgcagagtacnnggtcagaanncaagagtcnntttttttttttttttttttttttttttttt

SEQ ID NO: 4568 - DNA, 84 bp, Artificial
  Barcode component
  misc_feature (33)..(34): n is a, c, g, or t
  misc_feature (43)..(44): n is a, c, g, or t
  misc_feature (53)..(54): n is a, c, g, or t
tttttttaagcagtggtatcaacgcagagtacnngagtcgatnnaatcggcanntttttttttttttttttttttttttttttt

SEQ ID NO: 4569 - DNA, 84 bp, Artificial
  Barcode component
  misc_feature (33)..(34): n is a, c, g, or t
  misc_feature (43)..(44): n is a, c, g, or t
  misc_feature (53)..(54): n is a, c, g, or t
tttttttaagcagtggtatcaacgcagagtacnngagtcgatnntacggcatnntttttttttttttttttttttttttttttt

SEQ ID NO: 4570 - DNA, 84 bp, Artificial
  Barcode component
  misc_feature (33)..(34): n is a, c, g, or t
  misc_feature (43)..(44): n is a, c, g, or t
  misc_feature (53)..(54): n is a, c, g, or t
tttttttaagcagtggtatcaacgcagagtacnngagtcgatnnttggatcgnntttttttttttttttttttttttttttttt

SEQ ID NO: 4571 - DNA, 84 bp, Artificial
  Barcode component
  misc_feature (33)..(34): n is a, c, g, or t
  misc_feature (43)..(44): n is a, c, g, or t
  misc_feature (53)..(54): n is a, c, g, or t
tttttttaagcagtggtatcaacgcagagtacnngagtcgatnntggaacganntttttttttttttttttttttttttttttt

SEQ ID NO: 4572 - DNA, 84 bp, Artificial
  Barcode component
  misc_feature (33)..(34): n is a, c, g, or t
  misc_feature (43)..(44): n is a, c, g, or t
  misc_feature (53)..(54): n is a, c, g, or t
tttttttaagcagtggtatcaacgcagagtacnngagtcgatnnggcaatcanntttttttttttttttttttttttttttttt

SEQ ID NO: 4573 - DNA, 84 bp, Artificial
  Barcode component
  misc_feature (33)..(34): n is a, c, g, or t
  misc_feature (43)..(44): n is a, c, g, or t
  misc_feature (53)..(54): n is a, c, g, or t
tttttttaagcagtggtatcaacgcagagtacnngagtcgatnngaatccganntttttttttttttttttttttttttttttt

SEQ ID NO: 4574 - DNA, 84 bp, Artificial
  Barcode component
  misc_feature (33)..(34): n is a, c, g, or t
  misc_feature (43)..(44): n is a, c, g, or t
  misc_feature (53)..(54): n is a, c, g, or t
tttttttaagcagtggtatcaacgcagagtacnngagtcgatnnttacggtgnntttttttttttttttttttttttttttttt

SEQ ID NO: 4575 - DNA, 84 bp, Artificial
  Barcode component
  misc_feature (33)..(34): n is a, c, g, or t
  misc_feature (43)..(44): n is a, c, g, or t
  misc_feature (53)..(54): n is a, c, g, or t
tttttttaagcagtggtatcaacgcagagtacnngagtcgatnncatatcggnntttttttttttttttttttttttttttttt

SEQ ID NO: 4576 - DNA, 84 bp, Artificial
  Barcode component
  misc_feature (33)..(34): n is a, c, g, or t
  misc_feature (43)..(44): n is a, c, g, or t
  misc_feature (53)..(54): n is a, c, g, or t
tttttttaagcagtggtatcaacgcagagtacnngagtcgatnncttcggtanntttttttttttttttttttttttttttttt

SEQ ID NO: 4577 - DNA, 84 bp, Artificial
  Barcode component
  misc_feature (33)..(34): n is a, c, g, or t
  misc_feature (43)..(44): n is a, c, g, or t
  misc_feature (53)..(54): n is a, c, g, or t
tttttttaagcagtggtatcaacgcagagtacnngagtcgatnntcctaacgnntttttttttttttttttttttttttttttt

SEQ ID NO: 4578 - DNA, 84 bp, Artificial
  Barcode component
  misc_feature (33)..(34): n is a, c, g, or t
  misc_feature (43)..(44): n is a, c, g, or t
  misc_feature (53)..(54): n is a, c, g, or t
tttttttaagcagtggtatcaacgcagagtacnngagtcgatnngtaagccanntttttttttttttttttttttttttttttt

SEQ ID NO: 4579 - DNA, 84 bp, Artificial
  Barcode component
  misc_feature (33)..(34): n is a, c, g, or t
  misc_feature (43)..(44): n is a, c, g, or t
  misc_feature (53)..(54): n is a, c, g, or t
tttttttaagcagtggtatcaacgcagagtacnngagtcgatnntaaggtggnntttttttttttttttttttttttttttttt

SEQ ID NO: 4580 - DNA, 84 bp, Artificial
  Barcode component
  misc_feature (33)..(34): n is a, c, g, or t
  misc_feature (43)..(44): n is a, c, g, or t
  misc_feature (53)..(54): n is a, c, g, or t
tttttttaagcagtggtatcaacgcagagtacnngagtcgatnnggtaagctnntttttttttttttttttttttttttttttt

SEQ ID NO: 4581 - DNA, 84 bp, Artificial
  Barcode component
  misc_feature (33)..(34): n is a, c, g, or t
  misc_feature (43)..(44): n is a, c, g, or t
  misc_feature (53)..(54): n is a, c, g, or t
tttttttaagcagtggtatcaacgcagagtacnngagtcgatnntgtgtcganntttttttttttttttttttttttttttttt

SEQ ID NO: 4582 - DNA, 84 bp, Artificial
  Barcode component
  misc_feature (33)..(34): n is a, c, g, or t
  misc_feature (43)..(44): n is a, c, g, or t
  misc_feature (53)..(54): n is a, c, g, or t
tttttttaagcagtggtatcaacgcagagtacnngagtcgatnngagcatganntttttttttttttttttttttttttttttt

SEQ ID NO: 4583 - DNA, 84 bp, Artificial
  Barcode component
  misc_feature (33)..(34): n is a, c, g, or t
  misc_feature (43)..(44): n is a, c, g, or t
  misc_feature (53)..(54): n is a, c, g, or t
tttttttaagcagtggtatcaacgcagagtacnngagtcgatnntcgaagtcnntttttttttttttttttttttttttttttt

SEQ ID NO: 4584 - DNA, 84 bp, Artificial
  Barcode component
  misc_feature (33)..(34): n is a, c, g, or t
  misc_feature (43)..(44): n is a, c, g, or t
  misc_feature (53)..(54): n is a, c, g, or t
tttttttaagcagtggtatcaacgcagagtacnngagtcgatnnggtgaacanntttttttttttttttttttttttttttttt

SEQ ID NO: 4585 - DNA, 84 bp, Artificial
  Barcode component
  misc_feature (33)..(34): n is a, c, g, or t
  misc_feature (43)..(44): n is a, c, g, or t
  misc_feature (53)..(54): n is a, c, g, or t
tttttttaagcagtggtatcaacgcagagtacnngagtcgatnnacatgcacnntttttttttttttttttttttttttttttt

SEQ ID NO: 4586 - DNA, 84 bp, Artificial
  Barcode component
  misc_feature (33)..(34): n is a, c, g, or t
  misc_feature (43)..(44): n is a, c, g, or t
  misc_feature (53)..(54): n is a, c, g, or t
tttttttaagcagtggtatcaacgcagagtacnngagtcgatnnccaacagtnntttttttttttttttttttttttttttttt

SEQ ID NO: 4587 - DNA, 84 bp, Artificial
  Barcode component
  misc_feature (33)..(34): n is a, c, g, or t
  misc_feature (43)..(44): n is a, c, g, or t
  misc_feature (53)..(54): n is a, c, g, or t
tttttttaagcagtggtatcaacgcagagtacnngagtcgatnnagaacagcnntttttttttttttttttttttttttttttt

SEQ ID NO: 4588 - DNA, 84 bp, Artificial
  Barcode component
  misc_feature (33)..(34): n is a, c, g, or t
  misc_feature (43)..(44): n is a, c, g, or t
  misc_feature (53)..(54): n is a, c, g, or t
tttttttaagcagtggtatcaacgcagagtacnngagtcgatnngaacacgtnntttttttttttttttttttttttttttttt

SEQ ID NO: 4589 - DNA, 84 bp, Artificial
  Barcode component
  misc_feature (33)..(34): n is a, c, g, or t
  misc_feature (43)..(44): n is a, c, g, or t
  misc_feature (53)..(54): n is a, c, g, or t
tttttttaagcagtggtatcaacgcagagtacnngagtcgatnnggtcttcanntttttttttttttttttttttttttttttt

SEQ ID NO: 4590 - DNA, 84 bp, Artificial
  Barcode component
  misc_feature (33)..(34): n is a, c, g, or t
  misc_feature (43)..(44): n is a, c, g, or t
  misc_feature (53)..(54): n is a, c, g, or t
tttttttaagcagtggtatcaacgcagagtacnngagtcgatnnaggttcagnntttttttttttttttttttttttttttttt

SEQ ID NO: 4591 - DNA, 84 bp, Artificial
  Barcode component
  misc_feature (33)..(34): n is a, c, g, or t
  misc_feature (43)..(44): n is a, c, g, or t
  misc_feature (53)..(54): n is a, c, g, or t
tttttttaagcagtggtatcaacgcagagtacnngagtcgatnnctagagcanntttttttttttttttttttttttttttttt

SEQ ID NO: 4592 - DNA, 84 bp, Artificial
  Barcode component
  misc_feature (33)..(34): n is a, c, g, or t
  misc_feature (43)..(44): n is a, c, g, or t
  misc_feature (53)..(54): n is a, c, g, or t
tttttttaagcagtggtatcaacgcagagtacnngagtcgatnncttctagcnntttttttttttttttttttttttttttttt

SEQ ID NO: 4593 - DNA, 84 bp, Artificial
  Barcode component
  misc_feature (33)..(34): n is a, c, g, or t
  misc_feature (43)..(44): n is a, c, g, or t
  misc_feature (53)..(54): n is a, c, g, or t
tttttttaagcagtggtatcaacgcagagtacnngagtcgatnngagtaacgnntttttttttttttttttttttttttttttt

SEQ ID NO: 4594 - DNA, 84 bp, Artificial
  Barcode component
  misc_feature (33)..(34): n is a, c, g, or t
  misc_feature (43)..(44): n is a, c, g, or t
  misc_feature (53)..(54): n is a, c, g, or t
tttttttaagcagtggtatcaacgcagagtacnngagtcgatnnctaagaggnntttttttttttttttttttttttttttttt

SEQ ID NO: 4595 - DNA, 84 bp, Artificial
  Barcode component
  misc_feature (33)..(34): n is a, c, g, or t
  misc_feature (43)..(44): n is a, c, g, or t
  misc_feature (53)..(54): n is a, c, g, or t
tttttttaagcagtggtatcaacgcagagtacnngagtcgatnnacgtgtagnntttttttttttttttttttttttttttttt

SEQ ID NO: 4596 - DNA, 84 bp, Artificial
  Barcode component
  misc_feature (33)..(34): n is a, c, g, or t
  misc_feature (43)..(44): n is a, c, g, or t
  misc_feature (53)..(54): n is a, c, g, or t
tttttttaagcagtggtatcaacgcagagtacnngagtcgatnnactacaggnntttttttttttttttttttttttttttttt

SEQ ID NO: 4597 - DNA, 84 bp, Artificial
  Barcode component
  misc_feature (33)..(34): n is a, c, g, or t
  misc_feature (43)..(44): n is a, c, g, or t
  misc_feature (53)..(54): n is a, c, g, or t
tttttttaagcagtggtatcaacgcagagtacnngagtcgatnntacaggtcnntttttttttttttttttttttttttttttt

SEQ ID NO: 4598 - DNA, 84 bp, Artificial
  Barcode component
  misc_feature (33)..(34): n is a, c, g, or t
  misc_feature (43)..(44): n is a, c, g, or t
  misc_feature (53)..(54): n is a, c, g, or t
tttttttaagcagtggtatcaacgcagagtacnngagtcgatnnctcacatgnntttttttttttttttttttttttttttttt

SEQ ID NO: 4599 - DNA, 84 bp, Artificial
  Barcode component
  misc_feature (33)..(34): n is a, c, g, or t
  misc_feature (43)..(44): n is a, c, g, or t
  misc_feature (53)..(54): n is a, c, g, or t
tttttttaagcagtggtatcaacgcagagtacnngagtcgatnnactaggagnntttttttttttttttttttttttttttttt

SEQ ID NO: 4600 - DNA, 84 bp, Artificial
  Barcode component
  misc_feature (33)..(34): n is a, c, g, or t
  misc_feature (43)..(44): n is a, c, g, or t
  misc_feature (53)..(54): n is a, c, g, or t
tttttttaagcagtggtatcaacgcagagtacnngagtcgatnnccatagganntttttttttttttttttttttttttttttt

SEQ ID NO: 4601 - DNA, 84 bp, Artificial
  Barcode component
  misc_feature (33)..(34): n is a, c, g, or t
  misc_feature (43)..(44): n is a, c, g, or t
  misc_feature (53)..(54): n is a, c, g, or t
tttttttaagcagtggtatcaacgcagagtacnngagtcgatnnggagaatcnntttttttttttttttttttttttttttttt

SEQ ID NO: 4602 - DNA, 84 bp, Artificial
  Barcode component
  misc_feature (33)..(34): n is a, c, g, or t
  misc_feature (43)..(44): n is a, c, g, or t
  misc_feature (53)..(54): n is a, c, g, or t
tttttttaagcagtggtatcaacgcagagtacnngagtcgatnngccaagaanntttttttttttttttttttttttttttttt

SEQ ID NO: 4603 - DNA, 84 bp, Artificial
  Barcode component
  misc_feature (33)..(34): n is a, c, g, or t
  misc_feature (43)..(44): n is a, c, g, or t
  misc_feature (53)..(54): n is a, c, g, or t
tttttttaagcagtggtatcaacgcagagtacnngagtcgatnnaaggcaagnntttttttttttttttttttttttttttttt

SEQ ID NO: 4604 - DNA, 84 bp, Artificial
  Barcode component
  misc_feature (33)..(34): n is a, c, g, or t
  misc_feature (43)..(44): n is a, c, g, or t
  misc_feature (53)..(54): n is a, c, g, or t
tttttttaagcagtggtatcaacgcagagtacnngagtcgatnnaatgtcgcnntttttttttttttttttttttttttttttt

SEQ ID NO: 4605 - DNA, 84 bp, Artificial
  Barcode component
  misc_feature (33)..(34): n is a, c, g, or t
  misc_feature (43)..(44): n is a, c, g, or t
  misc_feature (53)..(54): n is a, c, g, or t
tttttttaagcagtggtatcaacgcagagtacnngagtcgatnnatggaaccnntttttttttttttttttttttttttttttt

SEQ ID NO: 4606 - DNA, 84 bp, Artificial
  Barcode component
  misc_feature (33)..(34): n is a, c, g, or t
  misc_feature (43)..(44): n is a, c, g, or t
  misc_feature (53)..(54): n is a, c, g, or t
tttttttaagcagtggtatcaacgcagagtacnngagtcgatnnagaggcatnntttttttttttttttttttttttttttttt

SEQ ID NO: 4607 - DNA, 84 bp, Artificial
  Barcode component
  misc_feature (33)..(34): n is a, c, g, or t
  misc_feature (43)..(44): n is a, c, g, or t
  misc_feature (53)..(54): n is a, c, g, or t
tttttttaagcagtggtatcaacgcagagtacnngagtcgatnntgcatagcnntttttttttttttttttttttttttttttt

SEQ ID NO: 4608 - DNA, 84 bp, Artificial
  Barcode component
  misc_feature (33)..(34): n is a, c, g, or t
  misc_feature (43)..(44): n is a, c, g, or t
  misc_feature (53)..(54): n is a, c, g, or t
tttttttaagcagtggtatcaacgcagagtacnngagtcgatnnctaacgganntttttttttttttttttttttttttttttt

SEQ ID NO: 4609 - DNA, 84 bp, Artificial
  Barcode component
  misc_feature (33)..(34): n is a, c, g, or t
  misc_feature (43)..(44): n is a, c, g, or t
  misc_feature (53)..(54): n is a, c, g, or t
tttttttaagcagtggtatcaacgcagagtacnngagtcgatnntatcgaggnntttttttttttttttttttttttttttttt

SEQ ID NO: 4610 - DNA, 84 bp, Artificial
  Barcode component
  misc_feature (33)..(34): n is a, c, g, or t
  misc_feature (43)..(44): n is a, c, g, or t
  misc_feature (53)..(54): n is a, c, g, or t
tttttttaagcagtggtatcaacgcagagtacnngagtcgatnncatagcctnntttttttttttttttttttttttttttttt

SEQ ID NO: 4611 - DNA, 84 bp, Artificial
  Barcode component
  misc_feature (33)..(34): n is a, c, g, or t
  misc_feature (43)..(44): n is a, c, g, or t
  misc_feature (53)..(54): n is a, c, g, or t
tttttttaagcagtggtatcaacgcagagtacnngagtcgatnnatcgagacnntttttttttttttttttttttttttttttt

SEQ ID NO: 4612 - DNA, 84 bp, Artificial
  Barcode component
  misc_feature (33)..(34): n is a, c, g, or t
  misc_feature (43)..(44): n is a, c, g, or t
  misc_feature (53)..(54): n is a, c, g, or t
tttttttaagcagtggtatcaacgcagagtacnngagtcgatnnggaagagtnntttttttttttttttttttttttttttttt

SEQ ID NO: 4613 - DNA, 84 bp, Artificial
  Barcode component
  misc_feature (33)..(34): n is a, c, g, or t
  misc_feature (43)..(44): n is a, c, g, or t
  misc_feature (53)..(54): n is a, c, g, or t
tttttttaagcagtggtatcaacgcagagtacnngagtcgatnnccaagtagnntttttttttttttttttttttttttttttt

SEQ ID NO: 4614 - DNA, 84 bp, Artificial
  Barcode component
  misc_feature (33)..(34): n is a, c, g, or t
  misc_feature (43)..(44): n is a, c, g, or t
  misc_feature (53)..(54): n is a, c, g, or t
tttttttaagcagtggtatcaacgcagagtacnngagtcgatnnctgaacagnntttttttttttttttttttttttttttttt

SEQ ID NO: 4615 - DNA, 84 bp, Artificial
  Barcode component
  misc_feature (33)..(34): n is a, c, g, or t
  misc_feature (43)..(44): n is a, c, g, or t
  misc_feature (53)..(54): n is a, c, g, or t
tttttttaagcagtggtatcaacgcagagtacnngagtcgatnngtaggttcnntttttttttttttttttttttttttttttt

SEQ ID NO: 4616 - DNA, 84 bp, Artificial
  Barcode component
  misc_feature (33)..(34): n is a, c, g, or t
  misc_feature (43)..(44): n is a, c, g, or t
  misc_feature (53)..(54): n is a, c, g, or t
tttttttaagcagtggtatcaacgcagagtacnngagtcgatnngtatggacnntttttttttttttttttttttttttttttt

SEQ ID NO: 4617 - DNA, 84 bp, Artificial
  Barcode component
  misc_feature (33)..(34): n is a, c, g, or t
  misc_feature (43)..(44): n is a, c, g, or t
  misc_feature (53)..(54): n is a, c, g, or t
tttttttaagcagtggtatcaacgcagagtacnngagtcgatnntcgcaacanntttttttttttttttttttttttttttttt

SEQ ID NO: 4618 - DNA, 84 bp, Artificial
  Barcode component
  misc_feature (33)..(34): n is a, c, g, or t
  misc_feature (43)..(44): n is a, c, g, or t
  misc_feature (53)..(54): n is a, c, g, or t
tttttttaagcagtggtatcaacgcagagtacnngagtcgatnnccgctaatnntttttttttttttttttttttttttttttt

SEQ ID NO: 4619 - DNA, 84 bp, Artificial
  Barcode component
  misc_feature (33)..(34): n is a, c, g, or t
  misc_feature (43)..(44): n is a, c, g, or t
  misc_feature (53)..(54): n is a, c, g, or t
tttttttaagcagtggtatcaacgcagagtacnngagtcgatnngattcgcanntttttttttttttttttttttttttttttt

SEQ ID NO: 4620 - DNA, 84 bp, Artificial
  Barcode component
  misc_feature (33)..(34): n is a, c, g, or t
  misc_feature (43)..(44): n is a, c, g, or t
  misc_feature (53)..(54): n is a, c, g, or t
tttttttaagcagtggtatcaacgcagagtacnngagtcgatnncgatggaanntttttttttttttttttttttttttttttt

SEQ ID NO: 4621 - DNA, 84 bp, Artificial
  Barcode component
  misc_feature (33)..(34): n is a, c, g, or t
  misc_feature (43)..(44): n is a, c, g, or t
  misc_feature (53)..(54): n is a, c, g, or t
tttttttaagcagtggtatcaacgcagagtacnngagtcgatnnagcaagganntttttttttttttttttttttttttttttt

SEQ ID NO: 4622 - DNA, 84 bp, Artificial
  Barcode component
  misc_feature (33)..(34): n is a, c, g, or t
  misc_feature (43)..(44): n is a, c, g, or t
  misc_feature (53)..(54): n is a, c, g, or t
tttttttaagcagtggtatcaacgcagagtacnngagtcgatnncgtagcaanntttttttttttttttttttttttttttttt

SEQ ID NO: 4623 - DNA, 84 bp, Artificial
  Barcode component
  misc_feature (33)..(34): n is a, c, g, or t
  misc_feature (43)..(44): n is a, c, g, or t
  misc_feature (53)..(54): n is a, c, g, or t
tttttttaagcagtggtatcaacgcagagtacnngagtcgatnntggcagtanntttttttttttttttttttttttttttttt

SEQ ID NO: 4624 - DNA, 84 bp, Artificial
  Barcode component
  misc_feature (33)..(34): n is a, c, g, or t
  misc_feature (43)..(44): n is a, c, g, or t
  misc_feature (53)..(54): n is a, c, g, or t
tttttttaagcagtggtatcaacgcagagtacnngagtcgatnncggtagttnntttttttttttttttttttttttttttttt

SEQ ID NO: 4625 - DNA, 84 bp, Artificial
  Barcode component
  misc_feature (33)..(34): n is a, c, g, or t
  misc_feature (43)..(44): n is a, c, g, or t
  misc_feature (53)..(54): n is a, c, g, or t
tttttttaagcagtggtatcaacgcagagtacnngagtcgatnntgacttcgnntttttttttttttttttttttttttttttt

SEQ ID NO: 4626 - DNA, 84 bp, Artificial
  Barcode component
  misc_feature (33)..(34): n is a, c, g, or t
  misc_feature (43)..(44): n is a, c, g, or t
  misc_feature (53)..(54): n is a, c, g, or t
tttttttaagcagtggtatcaacgcagagtacnngagtcgatnngagtgcaanntttttttttttttttttttttttttttttt

SEQ ID NO: 4627 - DNA, 84 bp, Artificial
  Barcode component
  misc_feature (33)..(34): n is a, c, g, or t
  misc_feature (43)..(44): n is a, c, g, or t
  misc_feature (53)..(54): n is a, c, g, or t
tttttttaagcagtggtatcaacgcagagtacnngagtcgatnnacggtaacnntttttttttttttttttttttttttttttt

SEQ ID NO: 4628 - DNA, 84 bp, Artificial
  Barcode component
  misc_feature (33)..(34): n is a, c, g, or t
  misc_feature (43)..(44): n is a, c, g, or t
  misc_feature (53)..(54): n is a, c, g, or t
tttttttaagcagtggtatcaacgcagagtacnngagtcgatnnaagtggtgnntttttttttttttttttttttttttttttt

SEQ ID NO: 4629 - DNA, 84 bp, Artificial
  Barcode component
  misc_feature (33)..(34): n is a, c, g, or t
  misc_feature (43)..(44): n is a, c, g, or t
  misc_feature (53)..(54): n is a, c, g, or t
tttttttaagcagtggtatcaacgcagagtacnngagtcgatnnggagacaanntttttttttttttttttttttttttttttt

SEQ ID NO: 4630 - DNA, 84 bp, Artificial
  Barcode component
  misc_feature (33)..(34): n is a, c, g, or t
  misc_feature (43)..(44): n is a, c, g, or t
  misc_feature (53)..(54): n is a, c, g, or t
tttttttaagcagtggtatcaacgcagagtacnngagtcgatnntcaaggacnntttttttttttttttttttttttttttttt

SEQ ID NO: 4631 - DNA, 84 bp, Artificial
  Barcode component
  misc_feature (33)..(34): n is a, c, g, or t
  misc_feature (43)..(44): n is a, c, g, or t
  misc_feature (53)..(54): n is a, c, g, or t
tttttttaagcagtggtatcaacgcagagtacnngagtcgatnnaagagagcnntttttttttttttttttttttttttttttt

SEQ ID NO: 4632 - DNA, 84 bp, Artificial
  Barcode component
  misc_feature (33)..(34): n is a, c, g, or t
  misc_feature (43)..(44): n is a, c, g, or t
  misc_feature (53)..(54): n is a, c, g, or t
tttttttaagcagtggtatcaacgcagagtacnngagtcgatnncgagagatnntttttttttttttttttttttttttttttt

SEQ ID NO: 4633 - DNA, 84 bp, Artificial
  Barcode component
  misc_feature (33)..(34): n is a, c, g, or t
  misc_feature (43)..(44): n is a, c, g, or t
  misc_feature (53)..(54): n is a, c, g, or t
tttttttaagcagtggtatcaacgcagagtacnngagtcgatnnacagatggnntttttttttttttttttttttttttttttt

SEQ ID NO: 4634 - DNA, 84 bp, Artificial
  Barcode component
  misc_feature (33)..(34): n is a, c, g, or t
  misc_feature (43)..(44): n is a, c, g, or t
  misc_feature (53)..(54): n is a, c, g, or t
tttttttaagcagtggtatcaacgcagagtacnngagtcgatnnaggagtcanntttttttttttttttttttttttttttttt

SEQ ID NO: 4635 - DNA, 84 bp, Artificial
  Barcode component
  misc_feature (33)..(34): n is a, c, g, or t
  misc_feature (43)..(44): n is a, c, g, or t
  misc_feature (53)..(54): n is a, c, g, or t
tttttttaagcagtggtatcaacgcagagtacnngagtcgatnncgtgttacnntttttttttttttttttttttttttttttt

SEQ ID NO: 4636 - DNA, 84 bp, Artificial
  Barcode component
  misc_feature (33)..(34): n is a, c, g, or t
  misc_feature (43)..(44): n is a, c, g, or t
  misc_feature (53)..(54): n is a, c, g, or t
tttttttaagcagtggtatcaacgcagagtacnngagtcgatnntagtgtgcnntttttttttttttttttttttttttttttt

SEQ ID NO: 4637 - DNA, 84 bp, Artificial
  Barcode component
  misc_feature (33)..(34): n is a, c, g, or t
  misc_feature (43)..(44): n is a, c, g, or t
  misc_feature (53)..(54): n is a, c, g, or t
tttttttaagcagtggtatcaacgcagagtacnngagtcgatnnctcatgacnntttttttttttttttttttttttttttttt

SEQ ID NO: 4638 - DNA, 84 bp, Artificial
  Barcode component
  misc_feature (33)..(34): n is a, c, g, or t
  misc_feature (43)..(44): n is a, c, g, or t
  misc_feature (53)..(54): n is a, c, g, or t
tttttttaagcagtggtatcaacgcagagtacnngagtcgatnngtatccagnntttttttttttttttttttttttttttttt

SEQ ID NO: 4639 - DNA, 84 bp, Artificial
  Barcode component
  misc_feature (33)..(34): n is a, c, g, or t
  misc_feature (43)..(44): n is a, c, g, or t
  misc_feature (53)..(54): n is a, c, g, or t
tttttttaagcagtggtatcaacgcagagtacnngagtcgatnnacgcctatnntttttttttttttttttttttttttttttt

SEQ ID NO: 4640 - DNA, 84 bp, Artificial
  Barcode component
  misc_feature (33)..(34): n is a, c, g, or t
  misc_feature (43)..(44): n is a, c, g, or t
  misc_feature (53)..(54): n is a, c, g, or t
tttttttaagcagtggtatcaacgcagagtacnngagtcgatnnaacgacctnntttttttttttttttttttttttttttttt

SEQ ID NO: 4641 - DNA, 84 bp, Artificial
  Barcode component
  misc_feature (33)..(34): n is a, c, g, or t
  misc_feature (43)..(44): n is a, c, g, or t
  misc_feature (53)..(54): n is a, c, g, or t
tttttttaagcagtggtatcaacgcagagtacnngagtcgatnnatcaggctnntttttttttttttttttttttttttttttt

SEQ ID NO: 4642 - DNA, 84 bp, Artificial
  Barcode component
  misc_feature (33)..(34): n is a, c, g, or t
  misc_feature (43)..(44): n is a, c, g, or t
  misc_feature (53)..(54): n is a, c, g, or t
tttttttaagcagtggtatcaacgcagagtacnngagtcgatnncaagttcgnntttttttttttttttttttttttttttttt

SEQ ID NO: 4643 - DNA, 84 bp, Artificial
  Barcode component
  misc_feature (33)..(34): n is a, c, g, or t
  misc_feature (43)..(44): n is a, c, g, or t
  misc_feature (53)..(54): n is a, c, g, or t
tttttttaagcagtggtatcaacgcagagtacnngagtcgatnntagccaganntttttttttttttttttttttttttttttt

SEQ ID NO: 4644 - DNA, 84 bp, Artificial
  Barcode component
  misc_feature (33)..(34): n is a, c, g, or t
  misc_feature (43)..(44): n is a, c, g, or t
  misc_feature (53)..(54): n is a, c, g, or t
tttttttaagcagtggtatcaacgcagagtacnngagtcgatnncaatcacgnntttttttttttttttttttttttttttttt

SEQ ID NO: 4645 - DNA, 84 bp, Artificial
  Barcode component
  misc_feature (33)..(34): n is a, c, g, or t
  misc_feature (43)..(44): n is a, c, g, or t
  misc_feature (53)..(54): n is a, c, g, or t
tttttttaagcagtggtatcaacgcagagtacnngagtcgatnngcaacaagnntttttttttttttttttttttttttttttt

SEQ ID NO: 4646 - DNA, 84 bp, Artificial
  Barcode component
  misc_feature (33)..(34): n is a, c, g, or t
  misc_feature (43)..(44): n is a, c, g, or t
  misc_feature (53)..(54): n is a, c, g, or t
tttttttaagcagtggtatcaacgcagagtacnngagtcgatnncacgacaanntttttttttttttttttttttttttttttt

SEQ ID NO: 4647 - DNA, 84 bp, Artificial
  Barcode component
  misc_feature (33)..(34): n is a, c, g, or t
  misc_feature (43)..(44): n is a, c, g, or t
  misc_feature (53)..(54): n is a, c, g, or t
tttttttaagcagtggtatcaacgcagagtacnngagtcgatnntacggaganntttttttttttttttttttttttttttttt

SEQ ID NO: 4648 - DNA, 84 bp, Artificial
  Barcode component
  misc_feature (33)..(34): n is a, c, g, or t
  misc_feature (43)..(44): n is a, c, g, or t
  misc_feature (53)..(54): n is a, c, g, or t
tttttttaagcagtggtatcaacgcagagtacnngagtcgatnncgacaaganntttttttttttttttttttttttttttttt

SEQ ID NO: 4649 - DNA, 84 bp, Artificial
  Barcode component
  misc_feature (33)..(34): n is a, c, g, or t
  misc_feature (43)..(44): n is a, c, g, or t
  misc_feature (53)..(54): n is a, c, g, or t
tttttttaagcagtggtatcaacgcagagtacnngagtcgatnncgaagtganntttttttttttttttttttttttttttttt

SEQ ID NO: 4650 - DNA, 84 bp, Artificial
  Barcode component
  misc_feature (33)..(34): n is a, c, g, or t
  misc_feature (43)..(44): n is a, c, g, or t
  misc_feature (53)..(54): n is a, c, g, or t
tttttttaagcagtggtatcaacgcagagtacnngagtcgatnnagctggtanntttttttttttttttttttttttttttttt

SEQ ID NO: 4651 - DNA, 84 bp, Artificial
  Barcode component
  misc_feature (33)..(34): n is a, c, g, or t
  misc_feature (43)..(44): n is a, c, g, or t
  misc_feature (53)..(54): n is a, c, g, or t
tttttttaagcagtggtatcaacgcagagtacnngagtcgatnnaactaggcnntttttttttttttttttttttttttttttt

SEQ ID NO: 4652 - DNA, 84 bp, Artificial
  Barcode component
  misc_feature (33)..(34): n is a, c, g, or t
  misc_feature (43)..(44): n is a, c, g, or t
  misc_feature (53)..(54): n is a, c, g, or t
tttttttaagcagtggtatcaacgcagagtacnngagtcgatnncagcaagtnntttttttttttttttttttttttttttttt

SEQ ID NO: 4653 - DNA, 84 bp, Artificial
  Barcode component
  misc_feature (33)..(34): n is a, c, g, or t
  misc_feature (43)..(44): n is a, c, g, or t
  misc_feature (53)..(54): n is a, c, g, or t
tttttttaagcagtggtatcaacgcagagtacnngagtcgatnnacgaggtanntttttttttttttttttttttttttttttt

SEQ ID NO: 4654 - DNA, 84 bp, Artificial
  Barcode component
  misc_feature (33)..(34): n is a, c, g, or t
  misc_feature (43)..(44): n is a, c, g, or t
  misc_feature (53)..(54): n is a, c, g, or t
tttttttaagcagtggtatcaacgcagagtacnngagtcgatnncatcttccnntttttttttttttttttttttttttttttt

SEQ ID NO: 4655 - DNA, 84 bp, Artificial
  Barcode component
  misc_feature (33)..(34): n is a, c, g, or t
  misc_feature (43)..(44): n is a, c, g, or t
  misc_feature (53)..(54): n is a, c, g, or t
tttttttaagcagtggtatcaacgcagagtacnngagtcgatnncctgaatcnntttttttttttttttttttttttttttttt

SEQ ID NO: 4656 - DNA, 84 bp, Artificial
  Barcode component
  misc_feature (33)..(34): n is a, c, g, or t
  misc_feature (43)..(44): n is a, c, g, or t
  misc_feature (53)..(54): n is a, c, g, or t
tttttttaagcagtggtatcaacgcagagtacnngagtcgatnntgcagactnntttttttttttttttttttttttttttttt

SEQ ID NO: 4657 - DNA, 84 bp, Artificial
  Barcode component
  misc_feature (33)..(34): n is a, c, g, or t
  misc_feature (43)..(44): n is a, c, g, or t
  misc_feature (53)..(54): n is a, c, g, or t
tttttttaagcagtggtatcaacgcagagtacnngagtcgatnnagatgtggnntttttttttttttttttttttttttttttt

SEQ ID NO: 4658 - DNA, 84 bp, Artificial
  Barcode component
  misc_feature (33)..(34): n is a, c, g, or t
  misc_feature (43)..(44): n is a, c, g, or t
  misc_feature (53)..(54): n is a, c, g, or t
tttttttaagcagtggtatcaacgcagagtacnngagtcgatnnagttcgacnntttttttttttttttttttttttttttttt

SEQ ID NO: 4659 - DNA, 84 bp, Artificial
  Barcode component
  misc_feature (33)..(34): n is a, c, g, or t
  misc_feature (43)..(44): n is a, c, g, or t
  misc_feature (53)..(54): n is a, c, g, or t
tttttttaagcagtggtatcaacgcagagtacnngagtcgatnnacaacctcnntttttttttttttttttttttttttttttt

SEQ ID NO: 4660 - DNA, 84 bp, Artificial
  Barcode component
  misc_feature (33)..(34): n is a, c, g, or t
  misc_feature (43)..(44): n is a, c, g, or t
  misc_feature (53)..(54): n is a, c, g, or t
tttttttaagcagtggtatcaacgcagagtacnngagtcgatnncatggtagnntttttttttttttttttttttttttttttt

SEQ ID NO: 4661 - DNA, 84 bp, Artificial
  Barcode component
  misc_feature (33)..(34): n is a, c, g, or t
  misc_feature (43)..(44): n is a, c, g, or t
  misc_feature (53)..(54): n is a, c, g, or t
tttttttaagcagtggtatcaacgcagagtacnngagtcgatnncgtatctcnntttttttttttttttttttttttttttttt

SEQ ID NO: 4662 - DNA, 84 bp, Artificial
  Barcode component
  misc_feature (33)..(34): n is a, c, g, or t
  misc_feature (43)..(44): n is a, c, g, or t
  misc_feature (53)..(54): n is a, c, g, or t
tttttttaagcagtggtatcaacgcagagtacnngagtcgatnncctagttcnntttttttttttttttttttttttttttttt

SEQ ID NO: 4663 - DNA, 84 bp, Artificial
  Barcode component
  misc_feature (33)..(34): n is a, c, g, or t
  misc_feature (43)..(44): n is a, c, g, or t
  misc_feature (53)..(54): n is a, c, g, or t
tttttttaagcagtggtatcaacgcagagtacnngagtcgatnncaagagtcnntttttttttttttttttttttttttttttt

SEQ ID NO: 4664 - DNA, 84 bp, Artificial
  Barcode component
  misc_feature (33)..(34): n is a, c, g, or t
  misc_feature (43)..(44): n is a, c, g, or t
  misc_feature (53)..(54): n is a, c, g, or t
tttttttaagcagtggtatcaacgcagagtacnngatggtgtnnaatcggcanntttttttttttttttttttttttttttttt

SEQ ID NO: 4665 - DNA, 84 bp, Artificial
  Barcode component
  misc_feature (33)..(34): n is a, c, g, or t
  misc_feature (43)..(44): n is a, c, g, or t
  misc_feature (53)..(54): n is a, c, g, or t
tttttttaagcagtggtatcaacgcagagtacnngatggtgtnntacggcatnntttttttttttttttttttttttttttttt

SEQ ID NO: 4666 - DNA, 84 bp, Artificial
  Barcode component
  misc_feature (33)..(34): n is a, c, g, or t
  misc_feature (43)..(44): n is a, c, g, or t
  misc_feature (53)..(54): n is a, c, g, or t
tttttttaagcagtggtatcaacgcagagtacnngatggtgtnnttggatcgnntttttttttttttttttttttttttttttt

SEQ ID NO: 4667 - DNA, 84 bp, Artificial
  Barcode component
  misc_feature (33)..(34): n is a, c, g, or t
  misc_feature (43)..(44): n is a, c, g, or t
  misc_feature (53)..(54): n is a, c, g, or t
tttttttaagcagtggtatcaacgcagagtacnngatggtgtnntggaacganntttttttttttttttttttttttttttttt

SEQ ID NO: 4668 - DNA, 84 bp, Artificial
  Barcode component
  misc_feature (33)..(34): n is a, c, g, or t
  misc_feature (43)..(44): n is a, c, g, or t
  misc_feature (53)..(54): n is a, c, g, or t
tttttttaagcagtggtatcaacgcagagtacnngatggtgtnnggcaatcanntttttttttttttttttttttttttttttt

SEQ ID NO: 4669 - DNA, 84 bp, Artificial
  Barcode component
  misc_feature (33)..(34): n is a, c, g, or t
  misc_feature (43)..(44): n is a, c, g, or t
  misc_feature (53)..(54): n is a, c, g, or t
tttttttaagcagtggtatcaacgcagagtacnngatggtgtnngaatccganntttttttttttttttttttttttttttttt

SEQ ID NO: 4670 - DNA, 84 bp, Artificial
  Barcode component
  misc_feature (33)..(34): n is a, c, g, or t
  misc_feature (43)..(44): n is a, c, g, or t
  misc_feature (53)..(54): n is a, c, g, or t
tttttttaagcagtggtatcaacgcagagtacnngatggtgtnnttacggtgnntttttttttttttttttttttttttttttt

SEQ ID NO: 4671 - DNA, 84 bp, Artificial
  Barcode component
  misc_feature (33)..(34): n is a, c, g, or t
  misc_feature (43)..(44): n is a, c, g, or t
  misc_feature (53)..(54): n is a, c, g, or t
tttttttaagcagtggtatcaacgcagagtacnngatggtgtnncatatcggnntttttttttttttttttttttttttttttt

SEQ ID NO: 4672 - DNA, 84 bp, Artificial
  Barcode component
  misc_feature (33)..(34): n is a, c, g, or t
  misc_feature (43)..(44): n is a, c, g, or t
  misc_feature (53)..(54): n is a, c, g, or t
tttttttaagcagtggtatcaacgcagagtacnngatggtgtnncttcggtanntttttttttttttttttttttttttttttt

SEQ ID NO: 4673 - DNA, 84 bp, Artificial
  Barcode component
  misc_feature (33)..(34): n is a, c, g, or t
  misc_feature (43)..(44): n is a, c, g, or t
  misc_feature (53)..(54): n is a, c, g, or t
tttttttaagcagtggtatcaacgcagagtacnngatggtgtnntcctaacgnntttttttttttttttttttttttttttttt

SEQ ID NO: 4674 - DNA, 84 bp, Artificial
  Barcode component
  misc_feature (33)..(34): n is a, c, g, or t
  misc_feature (43)..(44): n is a, c, g, or t
  misc_feature (53)..(54): n is a, c, g, or t
tttttttaagcagtggtatcaacgcagagtacnngatggtgtnngtaagccanntttttttttttttttttttttttttttttt

SEQ ID NO: 4675 - DNA, 84 bp, Artificial
  Barcode component
  misc_feature (33)..(34): n is a, c, g, or t
  misc_feature (43)..(44): n is a, c, g, or t
  misc_feature (53)..(54): n is a, c, g, or t
tttttttaagcagtggtatcaacgcagagtacnngatggtgtnntaaggtggnntttttttttttttttttttttttttttttt

SEQ ID NO: 4676 - DNA, 84 bp, Artificial
  Barcode component
  misc_feature (33)..(34): n is a, c, g, or t
  misc_feature (43)..(44): n is a, c, g, or t
  misc_feature (53)..(54): n is a, c, g, or t
tttttttaagcagtggtatcaacgcagagtacnngatggtgtnnggtaagctnntttttttttttttttttttttttttttttt

SEQ ID NO: 4677 - DNA, 84 bp, Artificial
  Barcode component
  misc_feature (33)..(34): n is a, c, g, or t
  misc_feature (43)..(44): n is a, c, g, or t
  misc_feature (53)..(54): n is a, c, g, or t
tttttttaagcagtggtatcaacgcagagtacnngatggtgtnntgtgtcganntttttttttttttttttttttttttttttt

SEQ ID NO: 4678 - DNA, 84 bp, Artificial
  Barcode component
  misc_feature (33)..(34): n is a, c, g, or t
  misc_feature (43)..(44): n is a, c, g, or t
  misc_feature (53)..(54): n is a, c, g, or t
tttttttaagcagtggtatcaacgcagagtacnngatggtgtnngagcatganntttttttttttttttttttttttttttttt

SEQ ID NO: 4679 - DNA, 84 bp, Artificial
  Barcode component
  misc_feature (33)..(34): n is a, c, g, or t
  misc_feature (43)..(44): n is a, c, g, or t
  misc_feature (53)..(54): n is a, c, g, or t
tttttttaagcagtggtatcaacgcagagtacnngatggtgtnntcgaagtcnntttttttttttttttttttttttttttttt

SEQ ID NO: 4680 - DNA, 84 bp, Artificial
  Barcode component
  misc_feature (33)..(34): n is a, c, g, or t
  misc_feature (43)..(44): n is a, c, g, or t
  misc_feature (53)..(54): n is a, c, g, or t
tttttttaagcagtggtatcaacgcagagtacnngatggtgtnnggtgaacanntttttttttttttttttttttttttttttt

SEQ ID NO: 4681 - DNA, 84 bp, Artificial
  Barcode component
  misc_feature (33)..(34): n is a, c, g, or t
  misc_feature (43)..(44): n is a, c, g, or t
  misc_feature (53)..(54): n is a, c, g, or t
tttttttaagcagtggtatcaacgcagagtacnngatggtgtnnacatgcacnntttttttttttttttttttttttttttttt

SEQ ID NO: 4682 - DNA, 84 bp, Artificial
  Barcode component
  misc_feature (33)..(34): n is a, c, g, or t
  misc_feature (43)..(44): n is a, c, g, or t
  misc_feature (53)..(54): n is a, c, g, or t
tttttttaagcagtggtatcaacgcagagtacnngatggtgtnnccaacagtnntttttttttttttttttttttttttttttt

SEQ ID NO: 4683 - DNA, 84 bp, Artificial
  Barcode component
  misc_feature (33)..(34): n is a, c, g, or t
  misc_feature (43)..(44): n is a, c, g, or t
  misc_feature (53)..(54): n is a, c, g, or t
tttttttaagcagtggtatcaacgcagagtacnngatggtgtnnagaacagcnntttttttttttttttttttttttttttttt

SEQ ID NO: 4684 - DNA, 84 bp, Artificial
  Barcode component
  misc_feature (33)..(34): n is a, c, g, or t
  misc_feature (43)..(44): n is a, c, g, or t
  misc_feature (53)..(54): n is a, c, g, or t
tttttttaagcagtggtatcaacgcagagtacnngatggtgtnngaacacgtnntttttttttttttttttttttttttttttt

SEQ ID NO: 4685 - DNA, 84 bp, Artificial
  Barcode component
  misc_feature (33)..(34): n is a, c, g, or t
  misc_feature (43)..(44): n is a, c, g, or t
  misc_feature (53)..(54): n is a, c, g, or t
tttttttaagcagtggtatcaacgcagagtacnngatggtgtnnggtcttcanntttttttttttttttttttttttttttttt

SEQ ID NO: 4686 - DNA, 84 bp, Artificial
  Barcode component
  misc_feature (33)..(34): n is a, c, g, or t
  misc_feature (43)..(44): n is a, c, g, or t
  misc_feature (53)..(54): n is a, c, g, or t
tttttttaagcagtggtatcaacgcagagtacnngatggtgtnnaggttcagnntttttttttttttttttttttttttttttt

SEQ ID NO: 4687 - DNA, 84 bp, Artificial
  Barcode component
  misc_feature (33)..(34): n is a, c, g, or t
  misc_feature (43)..(44): n is a, c, g, or t
  misc_feature (53)..(54): n is a, c, g, or t
tttttttaagcagtggtatcaacgcagagtacnngatggtgtnnctagagcanntttttttttttttttttttttttttttttt

SEQ ID NO: 4688 - DNA, 84 bp, Artificial
  Barcode component
  misc_feature (33)..(34): n is a, c, g, or t
  misc_feature (43)..(44): n is a, c, g, or t
  misc_feature (53)..(54): n is a, c, g, or t
tttttttaagcagtggtatcaacgcagagtacnngatggtgtnncttctagcnntttttttttttttttttttttttttttttt

SEQ ID NO: 4689 - DNA, 84 bp, Artificial
  Barcode component
  misc_feature (33)..(34): n is a, c, g, or t
  misc_feature (43)..(44): n is a, c, g, or t
  misc_feature (53)..(54): n is a, c, g, or t
tttttttaagcagtggtatcaacgcagagtacnngatggtgtnngagtaacgnntttttttttttttttttttttttttttttt

SEQ ID NO: 4690 - DNA, 84 bp, Artificial
  Barcode component
  misc_feature (33)..(34): n is a, c, g, or t
  misc_feature (43)..(44): n is a, c, g, or t
  misc_feature (53)..(54): n is a, c, g, or t
tttttttaagcagtggtatcaacgcagagtacnngatggtgtnnctaagaggnntttttttttttttttttttttttttttttt

SEQ ID NO: 4691 - DNA, 84 bp, Artificial
  Barcode component
  misc_feature (33)..(34): n is a, c, g, or t
  misc_feature (43)..(44): n is a, c, g, or t
  misc_feature (53)..(54): n is a, c, g, or t
tttttttaagcagtggtatcaacgcagagtacnngatggtgtnnacgtgtagnntttttttttttttttttttttttttttttt

SEQ ID NO: 4692 - DNA, 84 bp, Artificial
  Barcode component
  misc_feature (33)..(34): n is a, c, g, or t
  misc_feature (43)..(44): n is a, c, g, or t
  misc_feature (53)..(54): n is a, c, g, or t
tttttttaagcagtggtatcaacgcagagtacnngatggtgtnnactacaggnntttttttttttttttttttttttttttttt

SEQ ID NO: 4693 - DNA, 84 bp, Artificial
  Barcode component
  misc_feature (33)..(34): n is a, c, g, or t
  misc_feature (43)..(44): n is a, c, g, or t
  misc_feature (53)..(54): n is a, c, g, or t
tttttttaagcagtggtatcaacgcagagtacnngatggtgtnntacaggtcnntttttttttttttttttttttttttttttt

SEQ ID NO: 4694 - DNA, 84 bp, Artificial
  Barcode component
  misc_feature (33)..(34): n is a, c, g, or t
  misc_feature (43)..(44): n is a, c, g, or t
  misc_feature (53)..(54): n is a, c, g, or t
tttttttaagcagtggtatcaacgcagagtacnngatggtgtnnctcacatgnntttttttttttttttttttttttttttttt

SEQ ID NO: 4695 - DNA, 84 bp, Artificial
  Barcode component
  misc_feature (33)..(34): n is a, c, g, or t
  misc_feature (43)..(44): n is a, c, g, or t
  misc_feature (53)..(54): n is a, c, g, or t
tttttttaagcagtggtatcaacgcagagtacnngatggtgtnnactaggagnntttttttttttttttttttttttttttttt

SEQ ID NO: 4696 - DNA, 84 bp, Artificial
  Barcode component
  misc_feature (33)..(34): n is a, c, g, or t
  misc_feature (43)..(44): n is a, c, g, or t
  misc_feature (53)..(54): n is a, c, g, or t
tttttttaagcagtggtatcaacgcagagtacnngatggtgtnnccatagganntttttttttttttttttttttttttttttt

SEQ ID NO: 4697 - DNA, 84 bp, Artificial
  Barcode component
  misc_feature (33)..(34): n is a, c, g, or t
  misc_feature (43)..(44): n is a, c, g, or t
  misc_feature (53)..(54): n is a, c, g, or t
tttttttaagcagtggtatcaacgcagagtacnngatggtgtnnggagaatcnntttttttttttttttttttttttttttttt

SEQ ID NO: 4698 - DNA, 84 bp, Artificial
  Barcode component
  misc_feature (33)..(34): n is a, c, g, or t
  misc_feature (43)..(44): n is a, c, g, or t
  misc_feature (53)..(54): n is a, c, g, or t
tttttttaagcagtggtatcaacgcagagtacnngatggtgtnngccaagaanntttttttttttttttttttttttttttttt

SEQ ID NO: 4699 - DNA, 84 bp, Artificial
  Barcode component
  misc_feature (33)..(34): n is a, c, g, or t
  misc_feature (43)..(44): n is a, c, g, or t
  misc_feature (53)..(54): n is a, c, g, or t
tttttttaagcagtggtatcaacgcagagtacnngatggtgtnnaaggcaagnntttttttttttttttttttttttttttttt

SEQ ID NO: 4700 - DNA, 84 bp, Artificial
  Barcode component
  misc_feature (33)..(34): n is a, c, g, or t
  misc_feature (43)..(44): n is a, c, g, or t
  misc_feature (53)..(54): n is a, c, g, or t
tttttttaagcagtggtatcaacgcagagtacnngatggtgtnnaatgtcgcnntttttttttttttttttttttttttttttt

SEQ ID NO: 4701 - DNA, 84 bp, Artificial
  Barcode component
  misc_feature (33)..(34): n is a, c, g, or t
  misc_feature (43)..(44): n is a, c, g, or t
  misc_feature (53)..(54): n is a, c, g, or t
tttttttaagcagtggtatcaacgcagagtacnngatggtgtnnatggaaccnntttttttttttttttttttttttttttttt

SEQ ID NO: 4702 - DNA, 84 bp, Artificial
  Barcode component
  misc_feature (33)..(34): n is a, c, g, or t
  misc_feature (43)..(44): n is a, c, g, or t
  misc_feature (53)..(54): n is a, c, g, or t
tttttttaagcagtggtatcaacgcagagtacnngatggtgtnnagaggcatnntttttttttttttttttttttttttttttt

SEQ ID NO: 4703 - DNA, 84 bp, Artificial
  Barcode component
  misc_feature (33)..(34): n is a, c, g, or t
  misc_feature (43)..(44): n is a, c, g, or t
  misc_feature (53)..(54): n is a, c, g, or t
tttttttaagcagtggtatcaacgcagagtacnngatggtgtnntgcatagcnntttttttttttttttttttttttttttttt

SEQ ID NO: 4704 - DNA, 84 bp, Artificial
  Barcode component
  misc_feature (33)..(34): n is a, c, g, or t
  misc_feature (43)..(44): n is a, c, g, or t
  misc_feature (53)..(54): n is a, c, g, or t
tttttttaagcagtggtatcaacgcagagtacnngatggtgtnnctaacgganntttttttttttttttttttttttttttttt

SEQ ID NO: 4705 - DNA, 84 bp, Artificial
  Barcode component
  misc_feature (33)..(34): n is a, c, g, or t
  misc_feature (43)..(44): n is a, c, g, or t
  misc_feature (53)..(54): n is a, c, g, or t
tttttttaagcagtggtatcaacgcagagtacnngatggtgtnntatcgaggnntttttttttttttttttttttttttttttt

SEQ ID NO: 4706 - DNA, 84 bp, Artificial
  Barcode component
  misc_feature (33)..(34): n is a, c, g, or t
  misc_feature (43)..(44): n is a, c, g, or t
  misc_feature (53)..(54): n is a, c, g, or t
tttttttaagcagtggtatcaacgcagagtacnngatggtgtnncatagcctnntttttttttttttttttttttttttttttt

SEQ ID NO: 4707 - DNA, 84 bp, Artificial
  Barcode component
  misc_feature (33)..(34): n is a, c, g, or t
  misc_feature (43)..(44): n is a, c, g, or t
  misc_feature (53)..(54): n is a, c, g, or t
tttttttaagcagtggtatcaacgcagagtacnngatggtgtnnatcgagacnntttttttttttttttttttttttttttttt

SEQ ID NO: 4708 - DNA, 84 bp, Artificial
  Barcode component
  misc_feature (33)..(34): n is a, c, g, or t
  misc_feature (43)..(44): n is a, c, g, or t
  misc_feature (53)..(54): n is a, c, g, or t
tttttttaagcagtggtatcaacgcagagtacnngatggtgtnnggaagagtnntttttttttttttttttttttttttttttt

SEQ ID NO: 4709 - DNA, 84 bp, Artificial
  Barcode component
  misc_feature (33)..(34): n is a, c, g, or t
  misc_feature (43)..(44): n is a, c, g, or t
  misc_feature (53)..(54): n is a, c, g, or t
tttttttaagcagtggtatcaacgcagagtacnngatggtgtnnccaagtagnntttttttttttttttttttttttttttttt

SEQ ID NO: 4710 - DNA, 84 bp, Artificial
  Barcode component
  misc_feature (33)..(34): n is a, c, g, or t
  misc_feature (43)..(44): n is a, c, g, or t
  misc_feature (53)..(54): n is a, c, g, or t
tttttttaagcagtggtatcaacgcagagtacnngatggtgtnnctgaacagnntttttttttttttttttttttttttttttt

SEQ ID NO: 4711 - DNA, 84 bp, Artificial
  Barcode component
  misc_feature (33)..(34): n is a, c, g, or t
  misc_feature (43)..(44): n is a, c, g, or t
  misc_feature (53)..(54): n is a, c, g, or t
tttttttaagcagtggtatcaacgcagagtacnngatggtgtnngtaggttcnntttttttttttttttttttttttttttttt

SEQ ID NO: 4712 - DNA, 84 bp, Artificial
  Barcode component
  misc_feature (33)..(34): n is a, c, g, or t
  misc_feature (43)..(44): n is a, c, g, or t
  misc_feature (53)..(54): n is a, c, g, or t
tttttttaagcagtggtatcaacgcagagtacnngatggtgtnngtatggacnntttttttttttttttttttttttttttttt

SEQ ID NO: 4713 - DNA, 84 bp, Artificial
  Barcode component
  misc_feature (33)..(34): n is a, c, g, or t
  misc_feature (43)..(44): n is a, c, g, or t
  misc_feature (53)..(54): n is a, c, g, or t
tttttttaagcagtggtatcaacgcagagtacnngatggtgtnntcgcaacanntttttttttttttttttttttttttttttt

SEQ ID NO: 4714 - DNA, 84 bp, Artificial
  Barcode component
  misc_feature (33)..(34): n is a, c, g, or t
  misc_feature (43)..(44): n is a, c, g, or t
  misc_feature (53)..(54): n is a, c, g, or t
tttttttaagcagtggtatcaacgcagagtacnngatggtgtnnccgctaatnntttttttttttttttttttttttttttttt

SEQ ID NO: 4715 - DNA, 84 bp, Artificial
  Barcode component
  misc_feature (33)..(34): n is a, c, g, or t
  misc_feature (43)..(44): n is a, c, g, or t
  misc_feature (53)..(54): n is a, c, g, or t
tttttttaagcagtggtatcaacgcagagtacnngatggtgtnngattcgcanntttttttttttttttttttttttttttttt

SEQ ID NO: 4716 - DNA, 84 bp, Artificial
  Barcode component
  misc_feature (33)..(34): n is a, c, g, or t
  misc_feature (43)..(44): n is a, c, g, or t
  misc_feature (53)..(54): n is a, c, g, or t
tttttttaagcagtggtatcaacgcagagtacnngatggtgtnncgatggaanntttttttttttttttttttttttttttttt

SEQ ID NO: 4717 - DNA, 84 bp, Artificial
  Barcode component
  misc_feature (33)..(34): n is a, c, g, or t
  misc_feature (43)..(44): n is a, c, g, or t
  misc_feature (53)..(54): n is a, c, g, or t
tttttttaagcagtggtatcaacgcagagtacnngatggtgtnnagcaagganntttttttttttttttttttttttttttttt

SEQ ID NO: 4718 - DNA, 84 bp, Artificial
  Barcode component
  misc_feature (33)..(34): n is a, c, g, or t
  misc_feature (43)..(44): n is a, c, g, or t
  misc_feature (53)..(54): n is a, c, g, or t
tttttttaagcagtggtatcaacgcagagtacnngatggtgtnncgtagcaanntttttttttttttttttttttttttttttt

SEQ ID NO: 4719 - DNA, 84 bp, Artificial
  Barcode component
  misc_feature (33)..(34): n is a, c, g, or t
  misc_feature (43)..(44): n is a, c, g, or t
  misc_feature (53)..(54): n is a, c, g, or t
tttttttaagcagtggtatcaacgcagagtacnngatggtgtnntggcagtanntttttttttttttttttttttttttttttt

SEQ ID NO: 4720 - DNA, 84 bp, Artificial
  Barcode component
  misc_feature (33)..(34): n is a, c, g, or t
  misc_feature (43)..(44): n is a, c, g, or t
  misc_feature (53)..(54): n is a, c, g, or t
tttttttaagcagtggtatcaacgcagagtacnngatggtgtnncggtagttnntttttttttttttttttttttttttttttt

SEQ ID NO: 4721 - DNA, 84 bp, Artificial
  Barcode component
  misc_feature (33)..(34): n is a, c, g, or t
  misc_feature (43)..(44): n is a, c, g, or t
  misc_feature (53)..(54): n is a, c, g, or t
tttttttaagcagtggtatcaacgcagagtacnngatggtgtnntgacttcgnntttttttttttttttttttttttttttttt

SEQ ID NO: 4722 - DNA, 84 bp, Artificial
  Barcode component
  misc_feature (33)..(34): n is a, c, g, or t
  misc_feature (43)..(44): n is a, c, g, or t
  misc_feature (53)..(54): n is a, c, g, or t
tttttttaagcagtggtatcaacgcagagtacnngatggtgtnngagtgcaanntttttttttttttttttttttttttttttt

SEQ ID NO: 4723 - DNA, 84 bp, Artificial
  Barcode component
  misc_feature (33)..(34): n is a, c, g, or t
  misc_feature (43)..(44): n is a, c, g, or t
  misc_feature (53)..(54): n is a, c, g, or t
tttttttaagcagtggtatcaacgcagagtacnngatggtgtnnacggtaacnntttttttttttttttttttttttttttttt

SEQ ID NO: 4724 - DNA, 84 bp, Artificial
  Barcode component
  misc_feature (33)..(34): n is a, c, g, or t
  misc_feature (43)..(44): n is a, c, g, or t
  misc_feature (53)..(54): n is a, c, g, or t
tttttttaagcagtggtatcaacgcagagtacnngatggtgtnnaagtggtgnntttttttttttttttttttttttttttttt

SEQ ID NO: 4725 - DNA, 84 bp, Artificial
  Barcode component
  misc_feature (33)..(34): n is a, c, g, or t
  misc_feature (43)..(44): n is a, c, g, or t
  misc_feature (53)..(54): n is a, c, g, or t
tttttttaagcagtggtatcaacgcagagtacnngatggtgtnnggagacaanntttttttttttttttttttttttttttttt

SEQ ID NO: 4726 - DNA, 84 bp, Artificial
  Barcode component
  misc_feature (33)..(34): n is a, c, g, or t
  misc_feature (43)..(44): n is a, c, g, or t
  misc_feature (53)..(54): n is a, c, g, or t
tttttttaagcagtggtatcaacgcagagtacnngatggtgtnntcaaggacnntttttttttttttttttttttttttttttt

SEQ ID NO: 4727 - DNA, 84 bp, Artificial
  Barcode component
  misc_feature (33)..(34): n is a, c, g, or t
  misc_feature (43)..(44): n is a, c, g, or t
  misc_feature (53)..(54): n is a, c, g, or t
tttttttaagcagtggtatcaacgcagagtacnngatggtgtnnaagagagcnntttttttttttttttttttttttttttttt

SEQ ID NO: 4728 - DNA, 84 bp, Artificial
  Barcode component
  misc_feature (33)..(34): n is a, c, g, or t
  misc_feature (43)..(44): n is a, c, g, or t
  misc_feature (53)..(54): n is a, c, g, or t
tttttttaagcagtggtatcaacgcagagtacnngatggtgtnncgagagatnntttttttttttttttttttttttttttttt

SEQ ID NO: 4729 - DNA, 84 bp, Artificial
  Barcode component
  misc_feature (33)..(34): n is a, c, g, or t
  misc_feature (43)..(44): n is a, c, g, or t
  misc_feature (53)..(54): n is a, c, g, or t
tttttttaagcagtggtatcaacgcagagtacnngatggtgtnnacagatggnntttttttttttttttttttttttttttttt

SEQ ID NO: 4730 - DNA, 84 bp, Artificial
  Barcode component
  misc_feature (33)..(34): n is a, c, g, or t
  misc_feature (43)..(44): n is a, c, g, or t
  misc_feature (53)..(54): n is a, c, g, or t
tttttttaagcagtggtatcaacgcagagtacnngatggtgtnnaggagtcanntttttttttttttttttttttttttttttt

SEQ ID NO: 4731 - DNA, 84 bp, Artificial
  Barcode component
  misc_feature (33)..(34): n is a, c, g, or t
  misc_feature (43)..(44): n is a, c, g, or t
  misc_feature (53)..(54): n is a, c, g, or t
tttttttaagcagtggtatcaacgcagagtacnngatggtgtnncgtgttacnntttttttttttttttttttttttttttttt

SEQ ID NO: 4732 - DNA, 84 bp, Artificial
  Barcode component
  misc_feature (33)..(34): n is a, c, g, or t
  misc_feature (43)..(44): n is a, c, g, or t
  misc_feature (53)..(54): n is a, c, g, or t
tttttttaagcagtggtatcaacgcagagtacnngatggtgtnntagtgtgcnntttttttttttttttttttttttttttttt

SEQ ID NO: 4733 - DNA, 84 bp, Artificial
  Barcode component
  misc_feature (33)..(34): n is a, c, g, or t
  misc_feature (43)..(44): n is a, c, g, or t
  misc_feature (53)..(54): n is a, c, g, or t
tttttttaagcagtggtatcaacgcagagtacnngatggtgtnnctcatgacnntttttttttttttttttttttttttttttt

SEQ ID NO: 4734 - DNA, 84 bp, Artificial
  Barcode component
  misc_feature (33)..(34): n is a, c, g, or t
  misc_feature (43)..(44): n is a, c, g, or t
  misc_feature (53)..(54): n is a, c, g, or t
tttttttaagcagtggtatcaacgcagagtacnngatggtgtnngtatccagnntttttttttttttttttttttttttttttt

SEQ ID NO: 4735 - DNA, 84 bp, Artificial
  Barcode component
  misc_feature (33)..(34): n is a, c, g, or t
  misc_feature (43)..(44): n is a, c, g, or t
  misc_feature (53)..(54): n is a, c, g, or t
tttttttaagcagtggtatcaacgcagagtacnngatggtgtnnacgcctatnntttttttttttttttttttttttttttttt

SEQ ID NO: 4736 - DNA, 84 bp, Artificial
  Barcode component
  misc_feature (33)..(34): n is a, c, g, or t
  misc_feature (43)..(44): n is a, c, g, or t
  misc_feature (53)..(54): n is a, c, g, or t
tttttttaagcagtggtatcaacgcagagtacnngatggtgtnnaacgacctnntttttttttttttttttttttttttttttt

SEQ ID NO: 4737 - DNA, 84 bp, Artificial
  Barcode component
  misc_feature (33)..(34): n is a, c, g, or t
  misc_feature (43)..(44): n is a, c, g, or t
  misc_feature (53)..(54): n is a, c, g, or t
tttttttaagcagtggtatcaacgcagagtacnngatggtgtnnatcaggctnntttttttttttttttttttttttttttttt

SEQ ID NO: 4738 - DNA, 84 bp, Artificial
  Barcode component
  misc_feature (33)..(34): n is a, c, g, or t
  misc_feature (43)..(44): n is a, c, g, or t
  misc_feature (53)..(54): n is a, c, g, or t
tttttttaagcagtggtatcaacgcagagtacnngatggtgtnncaagttcgnntttttttttttttttttttttttttttttt

SEQ ID NO: 4739 - DNA, 84 bp, Artificial
  Barcode component
  misc_feature (33)..(34): n is a, c, g, or t
  misc_feature (43)..(44): n is a, c, g, or t
  misc_feature (53)..(54): n is a, c, g, or t
tttttttaagcagtggtatcaacgcagagtacnngatggtgtnntagccaganntttttttttttttttttttttttttttttt

SEQ ID NO: 4740 - DNA, 84 bp, Artificial
  Barcode component
  misc_feature (33)..(34): n is a, c, g, or t
  misc_feature (43)..(44): n is a, c, g, or t
  misc_feature (53)..(54): n is a, c, g, or t
tttttttaagcagtggtatcaacgcagagtacnngatggtgtnncaatcacgnntttttttttttttttttttttttttttttt

SEQ ID NO: 4741 - DNA, 84 bp, Artificial
  Barcode component
  misc_feature (33)..(34): n is a, c, g, or t
  misc_feature (43)..(44): n is a, c, g, or t
  misc_feature (53)..(54): n is a, c, g, or t
tttttttaagcagtggtatcaacgcagagtacnngatggtgtnngcaacaagnntttttttttttttttttttttttttttttt

SEQ ID NO: 4742 - DNA, 84 bp, Artificial
  Barcode component
  misc_feature (33)..(34): n is a, c, g, or t
  misc_feature (43)..(44): n is a, c, g, or t
  misc_feature (53)..(54): n is a, c, g, or t
tttttttaagcagtggtatcaacgcagagtacnngatggtgtnncacgacaanntttttttttttttttttttttttttttttt

SEQ ID NO: 4743 - DNA, 84 bp, Artificial
  Barcode component
  misc_feature (33)..(34): n is a, c, g, or t
  misc_feature (43)..(44): n is a, c, g, or t
  misc_feature (53)..(54): n is a, c, g, or t
tttttttaagcagtggtatcaacgcagagtacnngatggtgtnntacggaganntttttttttttttttttttttttttttttt

SEQ ID NO: 4744 - DNA, 84 bp, Artificial
  Barcode component
  misc_feature (33)..(34): n is a, c, g, or t
  misc_feature (43)..(44): n is a, c, g, or t
  misc_feature (53)..(54): n is a, c, g, or t
tttttttaagcagtggtatcaacgcagagtacnngatggtgtnncgacaaganntttttttttttttttttttttttttttttt

SEQ ID NO: 4745 - DNA, 84 bp, Artificial
  Barcode component
  misc_feature (33)..(34): n is a, c, g, or t
  misc_feature (43)..(44): n is a, c, g, or t
  misc_feature (53)..(54): n is a, c, g, or t
tttttttaagcagtggtatcaacgcagagtacnngatggtgtnncgaagtganntttttttttttttttttttttttttttttt

SEQ ID NO: 4746 - DNA, 84 bp, Artificial
  Barcode component
  misc_feature (33)..(34): n is a, c, g, or t
  misc_feature (43)..(44): n is a, c, g, or t
  misc_feature (53)..(54): n is a, c, g, or t
tttttttaagcagtggtatcaacgcagagtacnngatggtgtnnagctggtanntttttttttttttttttttttttttttttt

SEQ ID NO: 4747 - DNA, 84 bp, Artificial
  Barcode component
  misc_feature (33)..(34): n is a, c, g, or t
  misc_feature (43)..(44): n is a, c, g, or t
  misc_feature (53)..(54): n is a, c, g, or t
tttttttaagcagtggtatcaacgcagagtacnngatggtgtnnaactaggcnntttttttttttttttttttttttttttttt

SEQ ID NO: 4748 - DNA, 84 bp, Artificial
  Barcode component
  misc_feature (33)..(34): n is a, c, g, or t
  misc_feature (43)..(44): n is a, c, g, or t
  misc_feature (53)..(54): n is a, c, g, or t
tttttttaagcagtggtatcaacgcagagtacnngatggtgtnncagcaagtnntttttttttttttttttttttttttttttt

SEQ ID NO: 4749 - DNA, 84 bp, Artificial
  Barcode component
  misc_feature (33)..(34): n is a, c, g, or t
  misc_feature (43)..(44): n is a, c, g, or t
  misc_feature (53)..(54): n is a, c, g, or t
tttttttaagcagtggtatcaacgcagagtacnngatggtgtnnacgaggtanntttttttttttttttttttttttttttttt

SEQ ID NO: 4750 - DNA, 84 bp, Artificial
  Barcode component
  misc_feature (33)..(34): n is a, c, g, or t
  misc_feature (43)..(44): n is a, c, g, or t
  misc_feature (53)..(54): n is a, c, g, or t
tttttttaagcagtggtatcaacgcagagtacnngatggtgtnncatcttccnntttttttttttttttttttttttttttttt

SEQ ID NO: 4751 - DNA, 84 bp, Artificial
  Barcode component
  misc_feature (33)..(34): n is a, c, g, or t
  misc_feature (43)..(44): n is a, c, g, or t
  misc_feature (53)..(54): n is a, c, g, or t
tttttttaagcagtggtatcaacgcagagtacnngatggtgtnncctgaatcnntttttttttttttttttttttttttttttt

SEQ ID NO: 4752 - DNA, 84 bp, Artificial
  Barcode component
  misc_feature (33)..(34): n is a, c, g, or t
  misc_feature (43)..(44): n is a, c, g, or t
  misc_feature (53)..(54): n is a, c, g, or t
tttttttaagcagtggtatcaacgcagagtacnngatggtgtnntgcagactnntttttttttttttttttttttttttttttt

SEQ ID NO: 4753 - DNA, 84 bp, Artificial
  Barcode component
  misc_feature (33)..(34): n is a, c, g, or t
  misc_feature (43)..(44): n is a, c, g, or t
  misc_feature (53)..(54): n is a, c, g, or t
tttttttaagcagtggtatcaacgcagagtacnngatggtgtnnagatgtggnntttttttttttttttttttttttttttttt

SEQ ID NO: 4754 - DNA, 84 bp, Artificial
  Barcode component
  misc_feature (33)..(34): n is a, c, g, or t
  misc_feature (43)..(44): n is a, c, g, or t
  misc_feature (53)..(54): n is a, c, g, or t
tttttttaagcagtggtatcaacgcagagtacnngatggtgtnnagttcgacnntttttttttttttttttttttttttttttt

SEQ ID NO: 4755 - DNA, 84 bp, Artificial
  Barcode component
  misc_feature (33)..(34): n is a, c, g, or t
  misc_feature (43)..(44): n is a, c, g, or t
  misc_feature (53)..(54): n is a, c, g, or t
tttttttaagcagtggtatcaacgcagagtacnngatggtgtnnacaacctcnntttttttttttttttttttttttttttttt

SEQ ID NO: 4756 - DNA, 84 bp, Artificial
  Barcode component
  misc_feature (33)..(34): n is a, c, g, or t
  misc_feature (43)..(44): n is a, c, g, or t
  misc_feature (53)..(54): n is a, c, g, or t
tttttttaagcagtggtatcaacgcagagtacnngatggtgtnncatggtagnntttttttttttttttttttttttttttttt

SEQ ID NO: 4757 - DNA, 84 bp, Artificial
  Barcode component
  misc_feature (33)..(34): n is a, c, g, or t
  misc_feature (43)..(44): n is a, c, g, or t
  misc_feature (53)..(54): n is a, c, g, or t
tttttttaagcagtggtatcaacgcagagtacnngatggtgtnncgtatctcnntttttttttttttttttttttttttttttt

SEQ ID NO: 4758 - DNA, 84 bp, Artificial
  Barcode component
  misc_feature (33)..(34): n is a, c, g, or t
  misc_feature (43)..(44): n is a, c, g, or t
  misc_feature (53)..(54): n is a, c, g, or t
tttttttaagcagtggtatcaacgcagagtacnngatggtgtnncctagttcnntttttttttttttttttttttttttttttt

SEQ ID NO: 4759 - DNA, 84 bp, Artificial
  Barcode component
  misc_feature (33)..(34): n is a, c, g, or t
  misc_feature (43)..(44): n is a, c, g, or t
  misc_feature (53)..(54): n is a, c, g, or t
tttttttaagcagtggtatcaacgcagagtacnngatggtgtnncaagagtcnntttttttttttttttttttttttttttttt

SEQ ID NO: 4760 - DNA, 84 bp, Artificial
  Barcode component
  misc_feature (33)..(34): n is a, c, g, or t
  misc_feature (43)..(44): n is a, c, g, or t
  misc_feature (53)..(54): n is a, c, g, or t
tttttttaagcagtggtatcaacgcagagtacnnagaaggtcnnaatcggcanntttttttttttttttttttttttttttttt

SEQ ID NO: 4761 - DNA, 84 bp, Artificial
  Barcode component
  misc_feature (33)..(34): n is a, c, g, or t
  misc_feature (43)..(44): n is a, c, g, or t
  misc_feature (53)..(54): n is a, c, g, or t
tttttttaagcagtggtatcaacgcagagtacnnagaaggtcnntacggcatnntttttttttttttttttttttttttttttt

SEQ ID NO: 4762 - DNA, 84 bp, Artificial
  Barcode component
  misc_feature (33)..(34): n is a, c, g, or t
  misc_feature (43)..(44): n is a, c, g, or t
  misc_feature (53)..(54): n is a, c, g, or t
tttttttaagcagtggtatcaacgcagagtacnnagaaggtcnnttggatcgnntttttttttttttttttttttttttttttt

SEQ ID NO: 4763 - DNA, 84 bp, Artificial
  Barcode component
  misc_feature (33)..(34): n is a, c, g, or t
  misc_feature (43)..(44): n is a, c, g, or t
  misc_feature (53)..(54): n is a, c, g, or t
tttttttaagcagtggtatcaacgcagagtacnnagaaggtcnntggaacganntttttttttttttttttttttttttttttt

SEQ ID NO: 4764 - DNA, 84 bp, Artificial
  Barcode component
  misc_feature (33)..(34): n is a, c, g, or t
  misc_feature (43)..(44): n is a, c, g, or t
  misc_feature (53)..(54): n is a, c, g, or t
tttttttaagcagtggtatcaacgcagagtacnnagaaggtcnnggcaatcanntttttttttttttttttttttttttttttt

SEQ ID NO: 4765 - DNA, 84 bp, Artificial
  Barcode component
  misc_feature (33)..(34): n is a, c, g, or t
  misc_feature (43)..(44): n is a, c, g, or t
  misc_feature (53)..(54): n is a, c, g, or t
tttttttaagcagtggtatcaacgcagagtacnnagaaggtcnngaatccganntttttttttttttttttttttttttttttt

SEQ ID NO: 4766 - DNA, 84 bp, Artificial
  Barcode component
  misc_feature (33)..(34): n is a, c, g, or t
  misc_feature (43)..(44): n is a, c, g, or t
  misc_feature (53)..(54): n is a, c, g, or t
tttttttaagcagtggtatcaacgcagagtacnnagaaggtcnnttacggtgnntttttttttttttttttttttttttttttt

SEQ ID NO: 4767 - DNA, 84 bp, Artificial
  Barcode component
  misc_feature (33)..(34): n is a, c, g, or t
  misc_feature (43)..(44): n is a, c, g, or t
  misc_feature (53)..(54): n is a, c, g, or t
tttttttaagcagtggtatcaacgcagagtacnnagaaggtcnncatatcggnntttttttttttttttttttttttttttttt

SEQ ID NO: 4768 - DNA, 84 bp, Artificial
  Barcode component
  misc_feature (33)..(34): n is a, c, g, or t
  misc_feature (43)..(44): n is a, c, g, or t
  misc_feature (53)..(54): n is a, c, g, or t
tttttttaagcagtggtatcaacgcagagtacnnagaaggtcnncttcggtanntttttttttttttttttttttttttttttt

SEQ ID NO: 4769 - DNA, 84 bp, Artificial
  Barcode component
  misc_feature (33)..(34): n is a, c, g, or t
  misc_feature (43)..(44): n is a, c, g, or t
  misc_feature (53)..(54): n is a, c, g, or t
tttttttaagcagtggtatcaacgcagagtacnnagaaggtcnntcctaacgnntttttttttttttttttttttttttttttt

SEQ ID NO: 4770 - DNA, 84 bp, Artificial
  Barcode component
  misc_feature (33)..(34): n is a, c, g, or t
  misc_feature (43)..(44): n is a, c, g, or t
  misc_feature (53)..(54): n is a, c, g, or t
tttttttaagcagtggtatcaacgcagagtacnnagaaggtcnngtaagccanntttttttttttttttttttttttttttttt

SEQ ID NO: 4771 - DNA, 84 bp, Artificial
  Barcode component
  misc_feature (33)..(34): n is a, c, g, or t
  misc_feature (43)..(44): n is a, c, g, or t
  misc_feature (53)..(54): n is a, c, g, or t
tttttttaagcagtggtatcaacgcagagtacnnagaaggtcnntaaggtggnntttttttttttttttttttttttttttttt

SEQ ID NO: 4772 - DNA, 84 bp, Artificial
  Barcode component
  misc_feature (33)..(34): n is a, c, g, or t
  misc_feature (43)..(44): n is a, c, g, or t
  misc_feature (53)..(54): n is a, c, g, or t
tttttttaagcagtggtatcaacgcagagtacnnagaaggtcnnggtaagctnntttttttttttttttttttttttttttttt

SEQ ID NO: 4773 - DNA, 84 bp, Artificial
  Barcode component
  misc_feature (33)..(34): n is a, c, g, or t
  misc_feature (43)..(44): n is a, c, g, or t
  misc_feature (53)..(54): n is a, c, g, or t
tttttttaagcagtggtatcaacgcagagtacnnagaaggtcnntgtgtcganntttttttttttttttttttttttttttttt

SEQ ID NO: 4774 - DNA, 84 bp, Artificial
  Barcode component
  misc_feature (33)..(34): n is a, c, g, or t
  misc_feature (43)..(44): n is a, c, g, or t
  misc_feature (53)..(54): n is a, c, g, or t
tttttttaagcagtggtatcaacgcagagtacnnagaaggtcnngagcatganntttttttttttttttttttttttttttttt

SEQ ID NO: 4775 - DNA, 84 bp, Artificial
  Barcode component
  misc_feature (33)..(34): n is a, c, g, or t
  misc_feature (43)..(44): n is a, c, g, or t
  misc_feature (53)..(54): n is a, c, g, or t
tttttttaagcagtggtatcaacgcagagtacnnagaaggtcnntcgaagtcnntttttttttttttttttttttttttttttt

SEQ ID NO: 4776 - DNA, 84 bp, Artificial
  Barcode component
  misc_feature (33)..(34): n is a, c, g, or t
  misc_feature (43)..(44): n is a, c, g, or t
  misc_feature (53)..(54): n is a, c, g, or t
tttttttaagcagtggtatcaacgcagagtacnnagaaggtcnnggtgaacanntttttttttttttttttttttttttttttt

SEQ ID NO: 4777 - DNA, 84 bp, Artificial
  Barcode component
  misc_feature (33)..(34): n is a, c, g, or t
  misc_feature (43)..(44): n is a, c, g, or t
  misc_feature (53)..(54): n is a, c, g, or t
tttttttaagcagtggtatcaacgcagagtacnnagaaggtcnnacatgcacnntttttttttttttttttttttttttttttt

SEQ ID NO: 4778 - DNA, 84 bp, Artificial
  Barcode component
  misc_feature (33)..(34): n is a, c, g, or t
  misc_feature (43)..(44): n is a, c, g, or t
  misc_feature (53)..(54): n is a, c, g, or t
tttttttaagcagtggtatcaacgcagagtacnnagaaggtcnnccaacagtnntttttttttttttttttttttttttttttt

SEQ ID NO: 4779 - DNA, 84 bp, Artificial
  Barcode component
  misc_feature (33)..(34): n is a, c, g, or t
  misc_feature (43)..(44): n is a, c, g, or t
  misc_feature (53)..(54): n is a, c, g, or t
tttttttaagcagtggtatcaacgcagagtacnnagaaggtcnnagaacagcnntttttttttttttttttttttttttttttt

SEQ ID NO: 4780 - DNA, 84 bp, Artificial
  Barcode component
  misc_feature (33)..(34): n is a, c, g, or t
  misc_feature (43)..(44): n is a, c, g, or t
  misc_feature (53)..(54): n is a, c, g, or t
tttttttaagcagtggtatcaacgcagagtacnnagaaggtcnngaacacgtnntttttttttttttttttttttttttttttt

SEQ ID NO: 4781 - DNA, 84 bp, Artificial
  Barcode component
  misc_feature (33)..(34): n is a, c, g, or t
  misc_feature (43)..(44): n is a, c, g, or t
  misc_feature (53)..(54): n is a, c, g, or t
tttttttaagcagtggtatcaacgcagagtacnnagaaggtcnnggtcttcanntttttttttttttttttttttttttttttt

SEQ ID NO: 4782 - DNA, 84 bp, Artificial
  Barcode component
  misc_feature (33)..(34): n is a, c, g, or t
  misc_feature (43)..(44): n is a, c, g, or t
  misc_feature (53)..(54): n is a, c, g, or t
tttttttaagcagtggtatcaacgcagagtacnnagaaggtcnnaggttcagnntttttttttttttttttttttttttttttt

SEQ ID NO: 4783 - DNA, 84 bp, Artificial
  Barcode component
  misc_feature (33)..(34): n is a, c, g, or t
  misc_feature (43)..(44): n is a, c, g, or t
  misc_feature (53)..(54): n is a, c, g, or t
tttttttaagcagtggtatcaacgcagagtacnnagaaggtcnnctagagcanntttttttttttttttttttttttttttttt

SEQ ID NO: 4784 - DNA, 84 bp, Artificial
  Barcode component
  misc_feature (33)..(34): n is a, c, g, or t
  misc_feature (43)..(44): n is a, c, g, or t
  misc_feature (53)..(54): n is a, c, g, or t
tttttttaagcagtggtatcaacgcagagtacnnagaaggtcnncttctagcnntttttttttttttttttttttttttttttt

SEQ ID NO: 4785 - DNA, 84 bp, Artificial
  Barcode component
  misc_feature (33)..(34): n is a, c, g, or t
  misc_feature (43)..(44): n is a, c, g, or t
  misc_feature (53)..(54): n is a, c, g, or t
tttttttaagcagtggtatcaacgcagagtacnnagaaggtcnngagtaacgnntttttttttttttttttttttttttttttt

SEQ ID NO: 4786 - DNA, 84 bp, Artificial
  Barcode component
  misc_feature (33)..(34): n is a, c, g, or t
  misc_feature (43)..(44): n is a, c, g, or t
  misc_feature (53)..(54): n is a, c, g, or t
tttttttaagcagtggtatcaacgcagagtacnnagaaggtcnnctaagaggnntttttttttttttttttttttttttttttt

SEQ ID NO: 4787 - DNA, 84 bp, Artificial
  Barcode component
  misc_feature (33)..(34): n is a, c, g, or t
  misc_feature (43)..(44): n is a, c, g, or t
  misc_feature (53)..(54): n is a, c, g, or t
tttttttaagcagtggtatcaacgcagagtacnnagaaggtcnnacgtgtagnntttttttttttttttttttttttttttttt

SEQ ID NO: 4788 - DNA, 84 bp, Artificial
  Barcode component
  misc_feature (33)..(34): n is a, c, g, or t
  misc_feature (43)..(44): n is a, c, g, or t
  misc_feature (53)..(54): n is a, c, g, or t
tttttttaagcagtggtatcaacgcagagtacnnagaaggtcnnactacaggnntttttttttttttttttttttttttttttt

SEQ ID NO: 4789 - DNA, 84 bp, Artificial
  Barcode component
  misc_feature (33)..(34): n is a, c, g, or t
  misc_feature (43)..(44): n is a, c, g, or t
  misc_feature (53)..(54): n is a, c, g, or t
tttttttaagcagtggtatcaacgcagagtacnnagaaggtcnntacaggtcnntttttttttttttttttttttttttttttt

SEQ ID NO: 4790 - DNA, 84 bp, Artificial
  Barcode component
  misc_feature (33)..(34): n is a, c, g, or t
  misc_feature (43)..(44): n is a, c, g, or t
  misc_feature (53)..(54): n is a, c, g, or t
tttttttaagcagtggtatcaacgcagagtacnnagaaggtcnnctcacatgnntttttttttttttttttttttttttttttt

SEQ ID NO: 4791 - DNA, 84 bp, Artificial
  Barcode component
  misc_feature (33)..(34): n is a, c, g, or t
  misc_feature (43)..(44): n is a, c, g, or t
  misc_feature (53)..(54): n is a, c, g, or t
tttttttaagcagtggtatcaacgcagagtacnnagaaggtcnnactaggagnntttttttttttttttttttttttttttttt

SEQ ID NO: 4792 - DNA, 84 bp, Artificial
  Barcode component
  misc_feature (33)..(34): n is a, c, g, or t
  misc_feature (43)..(44): n is a, c, g, or t
  misc_feature (53)..(54): n is a, c, g, or t
tttttttaagcagtggtatcaacgcagagtacnnagaaggtcnnccatagganntttttttttttttttttttttttttttttt

SEQ ID NO: 4793 - DNA, 84 bp, Artificial
  Barcode component
  misc_feature (33)..(34): n is a, c, g, or t
  misc_feature (43)..(44): n is a, c, g, or t
  misc_feature (53)..(54): n is a, c, g, or t
tttttttaagcagtggtatcaacgcagagtacnnagaaggtcnnggagaatcnntttttttttttttttttttttttttttttt

SEQ ID NO: 4794 - DNA, 84 bp, Artificial
  Barcode component
  misc_feature (33)..(34): n is a, c, g, or t
  misc_feature (43)..(44): n is a, c, g, or t
  misc_feature (53)..(54): n is a, c, g, or t
tttttttaagcagtggtatcaacgcagagtacnnagaaggtcnngccaagaanntttttttttttttttttttttttttttttt

SEQ ID NO: 4795 - DNA, 84 bp, Artificial
  Barcode component
  misc_feature (33)..(34): n is a, c, g, or t
  misc_feature (43)..(44): n is a, c, g, or t
  misc_feature (53)..(54): n is a, c, g, or t
tttttttaagcagtggtatcaacgcagagtacnnagaaggtcnnaaggcaagnntttttttttttttttttttttttttttttt

SEQ ID NO: 4796 - DNA, 84 bp, Artificial
  Barcode component
  misc_feature (33)..(34): n is a, c, g, or t
  misc_feature (43)..(44): n is a, c, g, or t
  misc_feature (53)..(54): n is a, c, g, or t
tttttttaagcagtggtatcaacgcagagtacnnagaaggtcnnaatgtcgcnntttttttttttttttttttttttttttttt

SEQ ID NO: 4797 - DNA, 84 bp, Artificial
  Barcode component
  misc_feature (33)..(34): n is a, c, g, or t
  misc_feature (43)..(44): n is a, c, g, or t
  misc_feature (53)..(54): n is a, c, g, or t
tttttttaagcagtggtatcaacgcagagtacnnagaaggtcnnatggaaccnntttttttttttttttttttttttttttttt

SEQ ID NO: 4798 - DNA, 84 bp, Artificial
  Barcode component
  misc_feature (33)..(34): n is a, c, g, or t
  misc_feature (43)..(44): n is a, c, g, or t
  misc_feature (53)..(54): n is a, c, g, or t
tttttttaagcagtggtatcaacgcagagtacnnagaaggtcnnagaggcatnntttttttttttttttttttttttttttttt

SEQ ID NO: 4799 - DNA, 84 bp, Artificial
  Barcode component
  misc_feature (33)..(34): n is a, c, g, or t
  misc_feature (43)..(44): n is a, c, g, or t
  misc_feature (53)..(54): n is a, c, g, or t
tttttttaagcagtggtatcaacgcagagtacnnagaaggtcnntgcatagcnntttttttttttttttttttttttttttttt

SEQ ID NO: 4800 - DNA, 84 bp, Artificial
  Barcode component
  misc_feature (33)..(34): n is a, c, g, or t
  misc_feature (43)..(44): n is a, c, g, or t
  misc_feature (53)..(54): n is a, c, g, or t
tttttttaagcagtggtatcaacgcagagtacnnagaaggtcnnctaacgganntttttttttttttttttttttttttttttt

SEQ ID NO: 4801 - DNA, 84 bp, Artificial
  Barcode component
  misc_feature (33)..(34): n is a, c, g, or t
  misc_feature (43)..(44): n is a, c, g, or t
  misc_feature (53)..(54): n is a, c, g, or t
tttttttaagcagtggtatcaacgcagagtacnnagaaggtcnntatcgaggnntttttttttttttttttttttttttttttt

SEQ ID NO: 4802 - DNA, 84 bp, Artificial
  Barcode component
  misc_feature (33)..(34): n is a, c, g, or t
  misc_feature (43)..(44): n is a, c, g, or t
  misc_feature (53)..(54): n is a, c, g, or t
tttttttaagcagtggtatcaacgcagagtacnnagaaggtcnncatagcctnntttttttttttttttttttttttttttttt

SEQ ID NO: 4803 - DNA, 84 bp, Artificial
  Barcode component
  misc_feature (33)..(34): n is a, c, g, or t
  misc_feature (43)..(44): n is a, c, g, or t
  misc_feature (53)..(54): n is a, c, g, or t
tttttttaagcagtggtatcaacgcagagtacnnagaaggtcnnatcgagacnntttttttttttttttttttttttttttttt

SEQ ID NO: 4804 - DNA, 84 bp, Artificial
  Barcode component
  misc_feature (33)..(34): n is a, c, g, or t
  misc_feature (43)..(44): n is a, c, g, or t
  misc_feature (53)..(54): n is a, c, g, or t
tttttttaagcagtggtatcaacgcagagtacnnagaaggtcnnggaagagtnntttttttttttttttttttttttttttttt

SEQ ID NO: 4805 - DNA, 84 bp, Artificial
  Barcode component
  misc_feature (33)..(34): n is a, c, g, or t
  misc_feature (43)..(44): n is a, c, g, or t
  misc_feature (53)..(54): n is a, c, g, or t
tttttttaagcagtggtatcaacgcagagtacnnagaaggtcnnccaagtagnntttttttttttttttttttttttttttttt

SEQ ID NO: 4806 - DNA, 84 bp, Artificial
  Barcode component
  misc_feature (33)..(34): n is a, c, g, or t
  misc_feature (43)..(44): n is a, c, g, or t
  misc_feature (53)..(54): n is a, c, g, or t
tttttttaagcagtggtatcaacgcagagtacnnagaaggtcnnctgaacagnntttttttttttttttttttttttttttttt

SEQ ID NO: 4807 - DNA, 84 bp, Artificial
  Barcode component
  misc_feature (33)..(34): n is a, c, g, or t
  misc_feature (43)..(44): n is a, c, g, or t
  misc_feature (53)..(54): n is a, c, g, or t
tttttttaagcagtggtatcaacgcagagtacnnagaaggtcnngtaggttcnntttttttttttttttttttttttttttttt

SEQ ID NO: 4808 - DNA, 84 bp, Artificial
  Barcode component
  misc_feature (33)..(34): n is a, c, g, or t
  misc_feature (43)..(44): n is a, c, g, or t
  misc_feature (53)..(54): n is a, c, g, or t
tttttttaagcagtggtatcaacgcagagtacnnagaaggtcnngtatggacnntttttttttttttttttttttttttttttt

SEQ ID NO: 4809 - DNA, 84 bp, Artificial
  Barcode component
  misc_feature (33)..(34): n is a, c, g, or t
  misc_feature (43)..(44): n is a, c, g, or t
  misc_feature (53)..(54): n is a, c, g, or t
tttttttaagcagtggtatcaacgcagagtacnnagaaggtcnntcgcaacanntttttttttttttttttttttttttttttt

SEQ ID NO: 4810 - DNA, 84 bp, Artificial
  Barcode component
  misc_feature (33)..(34): n is a, c, g, or t
  misc_feature (43)..(44): n is a, c, g, or t
  misc_feature (53)..(54): n is a, c, g, or t
tttttttaagcagtggtatcaacgcagagtacnnagaaggtcnnccgctaatnntttttttttttttttttttttttttttttt

SEQ ID NO: 4811 - DNA, 84 bp, Artificial
  Barcode component
  misc_feature (33)..(34): n is a, c, g, or t
  misc_feature (43)..(44): n is a, c, g, or t
  misc_feature (53)..(54): n is a, c, g, or t
tttttttaagcagtggtatcaacgcagagtacnnagaaggtcnngattcgcanntttttttttttttttttttttttttttttt

SEQ ID NO: 4812 - DNA, 84 bp, Artificial
  Barcode component
  misc_feature (33)..(34): n is a, c, g, or t
  misc_feature (43)..(44): n is a, c, g, or t
  misc_feature (53)..(54): n is a, c, g, or t
tttttttaagcagtggtatcaacgcagagtacnnagaaggtcnncgatggaanntttttttttttttttttttttttttttttt

SEQ ID NO: 4813 - DNA, 84 bp, Artificial
  Barcode component
  misc_feature (33)..(34): n is a, c, g, or t
  misc_feature (43)..(44): n is a, c, g, or t
  misc_feature (53)..(54): n is a, c, g, or t
tttttttaagcagtggtatcaacgcagagtacnnagaaggtcnnagcaagganntttttttttttttttttttttttttttttt

SEQ ID NO: 4814 - DNA, 84 bp, Artificial
  Barcode component
  misc_feature (33)..(34): n is a, c, g, or t
  misc_feature (43)..(44): n is a, c, g, or t
  misc_feature (53)..(54): n is a, c, g, or t
tttttttaagcagtggtatcaacgcagagtacnnagaaggtcnncgtagcaanntttttttttttttttttttttttttttttt

SEQ ID NO: 4815 - DNA, 84 bp, Artificial
  Barcode component
  misc_feature (33)..(34): n is a, c, g, or t
  misc_feature (43)..(44): n is a, c, g, or t
  misc_feature (53)..(54): n is a, c, g, or t
tttttttaagcagtggtatcaacgcagagtacnnagaaggtcnntggcagtanntttttttttttttttttttttttttttttt

SEQ ID NO: 4816 - DNA, 84 bp, Artificial
  Barcode component
  misc_feature (33)..(34): n is a, c, g, or t
  misc_feature (43)..(44): n is a, c, g, or t
  misc_feature (53)..(54): n is a, c, g, or t
tttttttaagcagtggtatcaacgcagagtacnnagaaggtcnncggtagttnntttttttttttttttttttttttttttttt

SEQ ID NO: 4817 - DNA, 84 bp, Artificial
  Barcode component
  misc_feature (33)..(34): n is a, c, g, or t
  misc_feature (43)..(44): n is a, c, g, or t
  misc_feature (53)..(54): n is a, c, g, or t
tttttttaagcagtggtatcaacgcagagtacnnagaaggtcnntgacttcgnntttttttttttttttttttttttttttttt

SEQ ID NO: 4818 - DNA, 84 bp, Artificial
  Barcode component
  misc_feature (33)..(34): n is a, c, g, or t
  misc_feature (43)..(44): n is a, c, g, or t
  misc_feature (53)..(54): n is a, c, g, or t
tttttttaagcagtggtatcaacgcagagtacnnagaaggtcnngagtgcaanntttttttttttttttttttttttttttttt

SEQ ID NO: 4819 - DNA, 84 bp, Artificial
  Barcode component
  misc_feature (33)..(34): n is a, c, g, or t
  misc_feature (43)..(44): n is a, c, g, or t
  misc_feature (53)..(54): n is a, c, g, or t
tttttttaagcagtggtatcaacgcagagtacnnagaaggtcnnacggtaacnntttttttttttttttttttttttttttttt

SEQ ID NO: 4820 - DNA, 84 bp, Artificial
  Barcode component
  misc_feature (33)..(34): n is a, c, g, or t
  misc_feature (43)..(44): n is a, c, g, or t
  misc_feature (53)..(54): n is a, c, g, or t
tttttttaagcagtggtatcaacgcagagtacnnagaaggtcnnaagtggtgnntttttttttttttttttttttttttttttt

SEQ ID NO: 4821 - DNA, 84 bp, Artificial
  Barcode component
  misc_feature (33)..(34): n is a, c, g, or t
  misc_feature (43)..(44): n is a, c, g, or t
  misc_feature (53)..(54): n is a, c, g, or t
tttttttaagcagtggtatcaacgcagagtacnnagaaggtcnnggagacaanntttttttttttttttttttttttttttttt

SEQ ID NO: 4822 - DNA, 84 bp, Artificial
  Barcode component
  misc_feature (33)..(34): n is a, c, g, or t
  misc_feature (43)..(44): n is a, c, g, or t
  misc_feature (53)..(54): n is a, c, g, or t
tttttttaagcagtggtatcaacgcagagtacnnagaaggtcnntcaaggacnntttttttttttttttttttttttttttttt

SEQ ID NO: 4823 - DNA, 84 bp, Artificial
  Barcode component
  misc_feature (33)..(34): n is a, c, g, or t
  misc_feature (43)..(44): n is a, c, g, or t
  misc_feature (53)..(54): n is a, c, g, or t
tttttttaagcagtggtatcaacgcagagtacnnagaaggtcnnaagagagcnntttttttttttttttttttttttttttttt

SEQ ID NO: 4824 - DNA, 84 bp, Artificial
  Barcode component
  misc_feature (33)..(34): n is a, c, g, or t
  misc_feature (43)..(44): n is a, c, g, or t
  misc_feature (53)..(54): n is a, c, g, or t
tttttttaagcagtggtatcaacgcagagtacnnagaaggtcnncgagagatnntttttttttttttttttttttttttttttt

SEQ ID NO: 4825 - DNA, 84 bp, Artificial
  Barcode component
  misc_feature (33)..(34): n is a, c, g, or t
  misc_feature (43)..(44): n is a, c, g, or t
  misc_feature (53)..(54): n is a, c, g, or t
tttttttaagcagtggtatcaacgcagagtacnnagaaggtcnnacagatggnntttttttttttttttttttttttttttttt

SEQ ID NO: 4826 - DNA, 84 bp, Artificial
  Barcode component
  misc_feature (33)..(34): n is a, c, g, or t
  misc_feature (43)..(44): n is a, c, g, or t
  misc_feature (53)..(54): n is a, c, g, or t
tttttttaagcagtggtatcaacgcagagtacnnagaaggtcnnaggagtcanntttttttttttttttttttttttttttttt

SEQ ID NO: 4827 - DNA, 84 bp, Artificial
  Barcode component
  misc_feature (33)..(34): n is a, c, g, or t
  misc_feature (43)..(44): n is a, c, g, or t
  misc_feature (53)..(54): n is a, c, g, or t
tttttttaagcagtggtatcaacgcagagtacnnagaaggtcnncgtgttacnntttttttttttttttttttttttttttttt

SEQ ID NO: 4828 - DNA, 84 bp, Artificial
  Barcode component
  misc_feature (33)..(34): n is a, c, g, or t
  misc_feature (43)..(44): n is a, c, g, or t
  misc_feature (53)..(54): n is a, c, g, or t
tttttttaagcagtggtatcaacgcagagtacnnagaaggtcnntagtgtgcnntttttttttttttttttttttttttttttt

SEQ ID NO: 4829 - DNA, 84 bp, Artificial
  Barcode component
  misc_feature (33)..(34): n is a, c, g, or t
  misc_feature (43)..(44): n is a, c, g, or t
  misc_feature (53)..(54): n is a, c, g, or t
tttttttaagcagtggtatcaacgcagagtacnnagaaggtcnnctcatgacnntttttttttttttttttttttttttttttt

SEQ ID NO: 4830 - DNA, 84 bp, Artificial
  Barcode component
  misc_feature (33)..(34): n is a, c, g, or t
  misc_feature (43)..(44): n is a, c, g, or t
  misc_feature (53)..(54): n is a, c, g, or t
tttttttaagcagtggtatcaacgcagagtacnnagaaggtcnngtatccagnntttttttttttttttttttttttttttttt

SEQ ID NO: 4831 - DNA, 84 bp, Artificial
  Barcode component
  misc_feature (33)..(34): n is a, c, g, or t
  misc_feature (43)..(44): n is a, c, g, or t
  misc_feature (53)..(54): n is a, c, g, or t
tttttttaagcagtggtatcaacgcagagtacnnagaaggtcnnacgcctatnntttttttttttttttttttttttttttttt

SEQ ID NO: 4832 - DNA, 84 bp, Artificial
  Barcode component
  misc_feature (33)..(34): n is a, c, g, or t
  misc_feature (43)..(44): n is a, c, g, or t
  misc_feature (53)..(54): n is a, c, g, or t
tttttttaagcagtggtatcaacgcagagtacnnagaaggtcnnaacgacctnntttttttttttttttttttttttttttttt

SEQ ID NO: 4833 - DNA, 84 bp, Artificial
  Barcode component
  misc_feature (33)..(34): n is a, c, g, or t
  misc_feature (43)..(44): n is a, c, g, or t
  misc_feature (53)..(54): n is a, c, g, or t
tttttttaagcagtggtatcaacgcagagtacnnagaaggtcnnatcaggctnntttttttttttttttttttttttttttttt

SEQ ID NO: 4834 - DNA, 84 bp, Artificial
  Barcode component
  misc_feature (33)..(34): n is a, c, g, or t
  misc_feature (43)..(44): n is a, c, g, or t
  misc_feature (53)..(54): n is a, c, g, or t
tttttttaagcagtggtatcaacgcagagtacnnagaaggtcnncaagttcgnntttttttttttttttttttttttttttttt

SEQ ID NO: 4835 - DNA, 84 bp, Artificial
  Barcode component
  misc_feature (33)..(34): n is a, c, g, or t
  misc_feature (43)..(44): n is a, c, g, or t
  misc_feature (53)..(54): n is a, c, g, or t
tttttttaagcagtggtatcaacgcagagtacnnagaaggtcnntagccaganntttttttttttttttttttttttttttttt

SEQ ID NO: 4836 - DNA, 84 bp, Artificial
  Barcode component
  misc_feature (33)..(34): n is a, c, g, or t
  misc_feature (43)..(44): n is a, c, g, or t
  misc_feature (53)..(54): n is a, c, g, or t
tttttttaagcagtggtatcaacgcagagtacnnagaaggtcnncaatcacgnntttttttttttttttttttttttttttttt

SEQ ID NO: 4837 - DNA, 84 bp, Artificial
  Barcode component
  misc_feature (33)..(34): n is a, c, g, or t
  misc_feature (43)..(44): n is a, c, g, or t
  misc_feature (53)..(54): n is a, c, g, or t
tttttttaagcagtggtatcaacgcagagtacnnagaaggtcnngcaacaagnntttttttttttttttttttttttttttttt

SEQ ID NO: 4838 - DNA, 84 bp, Artificial
  Barcode component
  misc_feature (33)..(34): n is a, c, g, or t
  misc_feature (43)..(44): n is a, c, g, or t
  misc_feature (53)..(54): n is a, c, g, or t
tttttttaagcagtggtatcaacgcagagtacnnagaaggtcnncacgacaanntttttttttttttttttttttttttttttt

SEQ ID NO: 4839 - DNA, 84 bp, Artificial
  Barcode component
  misc_feature (33)..(34): n is a, c, g, or t
  misc_feature (43)..(44): n is a, c, g, or t
  misc_feature (53)..(54): n is a, c, g, or t
tttttttaagcagtggtatcaacgcagagtacnnagaaggtcnntacggaganntttttttttttttttttttttttttttttt

SEQ ID NO: 4840 - DNA, 84 bp, Artificial
  Barcode component
  misc_feature (33)..(34): n is a, c, g, or t
  misc_feature (43)..(44): n is a, c, g, or t
  misc_feature (53)..(54): n is a, c, g, or t
tttttttaagcagtggtatcaacgcagagtacnnagaaggtcnncgacaaganntttttttttttttttttttttttttttttt

SEQ ID NO: 4841 - DNA, 84 bp, Artificial
  Barcode component
  misc_feature (33)..(34): n is a, c, g, or t
  misc_feature (43)..(44): n is a, c, g, or t
  misc_feature (53)..(54): n is a, c, g, or t
tttttttaagcagtggtatcaacgcagagtacnnagaaggtcnncgaagtganntttttttttttttttttttttttttttttt

SEQ ID NO: 4842 - DNA, 84 bp, Artificial
  Barcode component
  misc_feature (33)..(34): n is a, c, g, or t
  misc_feature (43)..(44): n is a, c, g, or t
  misc_feature (53)..(54): n is a, c, g, or t
tttttttaagcagtggtatcaacgcagagtacnnagaaggtcnnagctggtanntttttttttttttttttttttttttttttt

SEQ ID NO: 4843 - DNA, 84 bp, Artificial
  Barcode component
  misc_feature (33)..(34): n is a, c, g, or t
  misc_feature (43)..(44): n is a, c, g, or t
  misc_feature (53)..(54): n is a, c, g, or t
tttttttaagcagtggtatcaacgcagagtacnnagaaggtcnnaactaggcnntttttttttttttttttttttttttttttt

SEQ ID NO: 4844 - DNA, 84 bp, Artificial
  Barcode component
  misc_feature (33)..(34): n is a, c, g, or t
  misc_feature (43)..(44): n is a, c, g, or t
  misc_feature (53)..(54): n is a, c, g, or t
tttttttaagcagtggtatcaacgcagagtacnnagaaggtcnncagcaagtnntttttttttttttttttttttttttttttt

SEQ ID NO: 4845 - DNA, 84 bp, Artificial
  Barcode component
  misc_feature (33)..(34): n is a, c, g, or t
  misc_feature (43)..(44): n is a, c, g, or t
  misc_feature (53)..(54): n is a, c, g, or t
tttttttaagcagtggtatcaacgcagagtacnnagaaggtcnnacgaggtanntttttttttttttttttttttttttttttt

SEQ ID NO: 4846 - DNA, 84 bp, Artificial
  Barcode component
  misc_feature (33)..(34): n is a, c, g, or t
  misc_feature (43)..(44): n is a, c, g, or t
  misc_feature (53)..(54): n is a, c, g, or t
tttttttaagcagtggtatcaacgcagagtacnnagaaggtcnncatcttccnntttttttttttttttttttttttttttttt

SEQ ID NO: 4847 - DNA, 84 bp, Artificial
  Barcode component
  misc_feature (33)..(34): n is a, c, g, or t
  misc_feature (43)..(44): n is a, c, g, or t
  misc_feature (53)..(54): n is a, c, g, or t
tttttttaagcagtggtatcaacgcagagtacnnagaaggtcnncctgaatcnntttttttttttttttttttttttttttttt

SEQ ID NO: 4848 - DNA, 84 bp, Artificial
  Barcode component
  misc_feature (33)..(34): n is a, c, g, or t
  misc_feature (43)..(44): n is a, c, g, or t
  misc_feature (53)..(54): n is a, c, g, or t
tttttttaagcagtggtatcaacgcagagtacnnagaaggtcnntgcagactnntttttttttttttttttttttttttttttt

SEQ ID NO: 4849 - DNA, 84 bp, Artificial
  Barcode component
  misc_feature (33)..(34): n is a, c, g, or t
  misc_feature (43)..(44): n is a, c, g, or t
  misc_feature (53)..(54): n is a, c, g, or t
tttttttaagcagtggtatcaacgcagagtacnnagaaggtcnnagatgtggnntttttttttttttttttttttttttttttt

SEQ ID NO: 4850 - DNA, 84 bp, Artificial
  Barcode component
  misc_feature (33)..(34): n is a, c, g, or t
  misc_feature (43)..(44): n is a, c, g, or t
  misc_feature (53)..(54): n is a, c, g, or t
tttttttaagcagtggtatcaacgcagagtacnnagaaggtcnnagttcgacnntttttttttttttttttttttttttttttt

SEQ ID NO: 4851 - DNA, 84 bp, Artificial
  Barcode component
  misc_feature (33)..(34): n is a, c, g, or t
  misc_feature (43)..(44): n is a, c, g, or t
  misc_feature (53)..(54): n is a, c, g, or t
tttttttaagcagtggtatcaacgcagagtacnnagaaggtcnnacaacctcnntttttttttttttttttttttttttttttt

SEQ ID NO: 4852 - DNA, 84 bp, Artificial
  Barcode component
  misc_feature (33)..(34): n is a, c, g, or t
  misc_feature (43)..(44): n is a, c, g, or t
  misc_feature (53)..(54): n is a, c, g, or t
tttttttaagcagtggtatcaacgcagagtacnnagaaggtcnncatggtagnntttttttttttttttttttttttttttttt

SEQ ID NO: 4853 - DNA, 84 bp, Artificial
  Barcode component
  misc_feature (33)..(34): n is a, c, g, or t
  misc_feature (43)..(44): n is a, c, g, or t
  misc_feature (53)..(54): n is a, c, g, or t
tttttttaagcagtggtatcaacgcagagtacnnagaaggtcnncgtatctcnntttttttttttttttttttttttttttttt

SEQ ID NO: 4854 - DNA, 84 bp, Artificial
  Barcode component
  misc_feature (33)..(34): n is a, c, g, or t
  misc_feature (43)..(44): n is a, c, g, or t
  misc_feature (53)..(54): n is a, c, g, or t
tttttttaagcagtggtatcaacgcagagtacnnagaaggtcnncctagttcnntttttttttttttttttttttttttttttt

SEQ ID NO: 4855 - DNA, 84 bp, Artificial
  Barcode component
  misc_feature (33)..(34): n is a, c, g, or t
  misc_feature (43)..(44): n is a, c, g, or t
  misc_feature (53)..(54): n is a, c, g, or t
tttttttaagcagtggtatcaacgcagagtacnnagaaggtcnncaagagtcnntttttttttttttttttttttttttttttt

SEQ ID NO: 4856 - DNA, 84 bp, Artificial
  Barcode component
  misc_feature (33)..(34): n is a, c, g, or t
  misc_feature (43)..(44): n is a, c, g, or t
  misc_feature (53)..(54): n is a, c, g, or t
tttttttaagcagtggtatcaacgcagagtacnnaggatgacnnaatcggcanntttttttttttttttttttttttttttttt

SEQ ID NO: 4857 - DNA, 84 bp, Artificial
  Barcode component
  misc_feature (33)..(34): n is a, c, g, or t
  misc_feature (43)..(44): n is a, c, g, or t
  misc_feature (53)..(54): n is a, c, g, or t
tttttttaagcagtggtatcaacgcagagtacnnaggatgacnntacggcatnntttttttttttttttttttttttttttttt

SEQ ID NO: 4858 - DNA, 84 bp, Artificial
  Barcode component
  misc_feature (33)..(34): n is a, c, g, or t
  misc_feature (43)..(44): n is a, c, g, or t
  misc_feature (53)..(54): n is a, c, g, or t
tttttttaagcagtggtatcaacgcagagtacnnaggatgacnnttggatcgnntttttttttttttttttttttttttttttt

SEQ ID NO: 4859 - DNA, 84 bp, Artificial
  Barcode component
  misc_feature (33)..(34): n is a, c, g, or t
  misc_feature (43)..(44): n is a, c, g, or t
  misc_feature (53)..(54): n is a, c, g, or t
tttttttaagcagtggtatcaacgcagagtacnnaggatgacnntggaacganntttttttttttttttttttttttttttttt

SEQ ID NO: 4860 - DNA, 84 bp, Artificial
  Barcode component
  misc_feature (33)..(34): n is a, c, g, or t
  misc_feature (43)..(44): n is a, c, g, or t
  misc_feature (53)..(54): n is a, c, g, or t
tttttttaagcagtggtatcaacgcagagtacnnaggatgacnnggcaatcanntttttttttttttttttttttttttttttt

SEQ ID NO: 4861 - DNA, 84 bp, Artificial
  Barcode component
  misc_feature (33)..(34): n is a, c, g, or t
  misc_feature (43)..(44): n is a, c, g, or t
  misc_feature (53)..(54): n is a, c, g, or t
tttttttaagcagtggtatcaacgcagagtacnnaggatgacnngaatccganntttttttttttttttttttttttttttttt

SEQ ID NO: 4862 - DNA, 84 bp, Artificial
  Barcode component
  misc_feature (33)..(34): n is a, c, g, or t
  misc_feature (43)..(44): n is a, c, g, or t
  misc_feature (53)..(54): n is a, c, g, or t
tttttttaagcagtggtatcaacgcagagtacnnaggatgacnnttacggtgnntttttttttttttttttttttttttttttt

SEQ ID NO: 4863 - DNA, 84 bp, Artificial
  Barcode component
  misc_feature (33)..(34): n is a, c, g, or t
  misc_feature (43)..(44): n is a, c, g, or t
  misc_feature (53)..(54): n is a, c, g, or t
tttttttaagcagtggtatcaacgcagagtacnnaggatgacnncatatcggnntttttttttttttttttttttttttttttt

SEQ ID NO: 4864 - DNA, 84 bp, Artificial
  Barcode component
  misc_feature (33)..(34): n is a, c, g, or t
  misc_feature (43)..(44): n is a, c, g, or t
  misc_feature (53)..(54): n is a, c, g, or t
tttttttaagcagtggtatcaacgcagagtacnnaggatgacnncttcggtanntttttttttttttttttttttttttttttt

SEQ ID NO: 4865 - DNA, 84 bp, Artificial
  Barcode component
  misc_feature (33)..(34): n is a, c, g, or t
  misc_feature (43)..(44): n is a, c, g, or t
  misc_feature (53)..(54): n is a, c, g, or t
tttttttaagcagtggtatcaacgcagagtacnnaggatgacnntcctaacgnntttttttttttttttttttttttttttttt

SEQ ID NO: 4866 - DNA, 84 bp, Artificial
  Barcode component
  misc_feature (33)..(34): n is a, c, g, or t
  misc_feature (43)..(44): n is a, c, g, or t
  misc_feature (53)..(54): n is a, c, g, or t
tttttttaagcagtggtatcaacgcagagtacnnaggatgacnngtaagccanntttttttttttttttttttttttttttttt

SEQ ID NO: 4867 - DNA, 84 bp, Artificial
  Barcode component
  misc_feature (33)..(34): n is a, c, g, or t
  misc_feature (43)..(44): n is a, c, g, or t
  misc_feature (53)..(54): n is a, c, g, or t
tttttttaagcagtggtatcaacgcagagtacnnaggatgacnntaaggtggnntttttttttttttttttttttttttttttt

SEQ ID NO: 4868 - DNA, 84 bp, Artificial
  Barcode component
  misc_feature (33)..(34): n is a, c, g, or t
  misc_feature (43)..(44): n is a, c, g, or t
  misc_feature (53)..(54): n is a, c, g, or t
tttttttaagcagtggtatcaacgcagagtacnnaggatgacnnggtaagctnntttttttttttttttttttttttttttttt

SEQ ID NO: 4869 - DNA, 84 bp, Artificial
  Barcode component
  misc_feature (33)..(34): n is a, c, g, or t
  misc_feature (43)..(44): n is a, c, g, or t
  misc_feature (53)..(54): n is a, c, g, or t
tttttttaagcagtggtatcaacgcagagtacnnaggatgacnntgtgtcganntttttttttttttttttttttttttttttt

SEQ ID NO: 4870 - DNA, 84 bp, Artificial
  Barcode component
  misc_feature (33)..(34): n is a, c, g, or t
  misc_feature (43)..(44): n is a, c, g, or t
  misc_feature (53)..(54): n is a, c, g, or t
tttttttaagcagtggtatcaacgcagagtacnnaggatgacnngagcatganntttttttttttttttttttttttttttttt

SEQ ID NO: 4871 - DNA, 84 bp, Artificial
  Barcode component
  misc_feature (33)..(34): n is a, c, g, or t
  misc_feature (43)..(44): n is a, c, g, or t
  misc_feature (53)..(54): n is a, c, g, or t
tttttttaagcagtggtatcaacgcagagtacnnaggatgacnntcgaagtcnntttttttttttttttttttttttttttttt

SEQ ID NO: 4872 - DNA, 84 bp, Artificial
  Barcode component
  misc_feature (33)..(34): n is a, c, g, or t
  misc_feature (43)..(44): n is a, c, g, or t
  misc_feature (53)..(54): n is a, c, g, or t
tttttttaagcagtggtatcaacgcagagtacnnaggatgacnnggtgaacanntttttttttttttttttttttttttttttt

SEQ ID NO: 4873 - DNA, 84 bp, Artificial
  Barcode component
  misc_feature (33)..(34): n is a, c, g, or t
  misc_feature (43)..(44): n is a, c, g, or t
  misc_feature (53)..(54): n is a, c, g, or t
tttttttaagcagtggtatcaacgcagagtacnnaggatgacnnacatgcacnntttttttttttttttttttttttttttttt

SEQ ID NO: 4874 - DNA, 84 bp, Artificial
  Barcode component
  misc_feature (33)..(34): n is a, c, g, or t
  misc_feature (43)..(44): n is a, c, g, or t
  misc_feature (53)..(54): n is a, c, g, or t
tttttttaagcagtggtatcaacgcagagtacnnaggatgacnnccaacagtnntttttttttttttttttttttttttttttt

SEQ ID NO: 4875 - DNA, 84 bp, Artificial
  Barcode component
  misc_feature (33)..(34): n is a, c, g, or t
  misc_feature (43)..(44): n is a, c, g, or t
  misc_feature (53)..(54): n is a, c, g, or t
tttttttaagcagtggtatcaacgcagagtacnnaggatgacnnagaacagcnntttttttttttttttttttttttttttttt

SEQ ID NO: 4876 - DNA, 84 bp, Artificial
  Barcode component
  misc_feature (33)..(34): n is a, c, g, or t
  misc_feature (43)..(44): n is a, c, g, or t
  misc_feature (53)..(54): n is a, c, g, or t
tttttttaagcagtggtatcaacgcagagtacnnaggatgacnngaacacgtnntttttttttttttttttttttttttttttt

SEQ ID NO: 4877 - DNA, 84 bp, Artificial
  Barcode component
  misc_feature (33)..(34): n is a, c, g, or t
  misc_feature (43)..(44): n is a, c, g, or t
  misc_feature (53)..(54): n is a, c, g, or t
tttttttaagcagtggtatcaacgcagagtacnnaggatgacnnggtcttcanntttttttttttttttttttttttttttttt

SEQ ID NO: 4878 - DNA, 84 bp, Artificial
  Barcode component
  misc_feature (33)..(34): n is a, c, g, or t
  misc_feature (43)..(44): n is a, c, g, or t
  misc_feature (53)..(54): n is a, c, g, or t
tttttttaagcagtggtatcaacgcagagtacnnaggatgacnnaggttcagnntttttttttttttttttttttttttttttt

SEQ ID NO: 4879 - DNA, 84 bp, Artificial
  Barcode component
  misc_feature (33)..(34): n is a, c, g, or t
  misc_feature (43)..(44): n is a, c, g, or t
  misc_feature (53)..(54): n is a, c, g, or t
tttttttaagcagtggtatcaacgcagagtacnnaggatgacnnctagagcanntttttttttttttttttttttttttttttt

SEQ ID NO: 4880 - DNA, 84 bp, Artificial
  Barcode component
  misc_feature (33)..(34): n is a, c, g, or t
  misc_feature (43)..(44): n is a, c, g, or t
  misc_feature (53)..(54): n is a, c, g, or t
tttttttaagcagtggtatcaacgcagagtacnnaggatgacnncttctagcnntttttttttttttttttttttttttttttt

SEQ ID NO: 4881 - DNA, 84 bp, Artificial
  Barcode component
  misc_feature (33)..(34): n is a, c, g, or t
  misc_feature (43)..(44): n is a, c, g, or t
  misc_feature (53)..(54): n is a, c, g, or t
tttttttaagcagtggtatcaacgcagagtacnnaggatgacnngagtaacgnntttttttttttttttttttttttttttttt

SEQ ID NO: 4882 - DNA, 84 bp, Artificial
  Barcode component
  misc_feature (33)..(34): n is a, c, g, or t
  misc_feature (43)..(44): n is a, c, g, or t
  misc_feature (53)..(54): n is a, c, g, or t
tttttttaagcagtggtatcaacgcagagtacnnaggatgacnnctaagaggnntttttttttttttttttttttttttttttt

SEQ ID NO: 4883 - DNA, 84 bp, Artificial
  Barcode component
  misc_feature (33)..(34): n is a, c, g, or t
  misc_feature (43)..(44): n is a, c, g, or t
  misc_feature (53)..(54): n is a, c, g, or t
tttttttaagcagtggtatcaacgcagagtacnnaggatgacnnacgtgtagnntttttttttttttttttttttttttttttt

SEQ ID NO: 4884 - DNA, 84 bp, Artificial
  Barcode component
  misc_feature (33)..(34): n is a, c, g, or t
  misc_feature (43)..(44): n is a, c, g, or t
  misc_feature (53)..(54): n is a, c, g, or t
tttttttaagcagtggtatcaacgcagagtacnnaggatgacnnactacaggnntttttttttttttttttttttttttttttt

SEQ ID NO: 4885 - DNA, 84 bp, Artificial
  Barcode component
  misc_feature (33)..(34): n is a, c, g, or t
  misc_feature (43)..(44): n is a, c, g, or t
  misc_feature (53)..(54): n is a, c, g, or t
tttttttaagcagtggtatcaacgcagagtacnnaggatgacnntacaggtcnntttttttttttttttttttttttttttttt

SEQ ID NO: 4886 - DNA, 84 bp, Artificial
  Barcode component
  misc_feature (33)..(34): n is a, c, g, or t
  misc_feature (43)..(44): n is a, c, g, or t
  misc_feature (53)..(54): n is a, c, g, or t
tttttttaagcagtggtatcaacgcagagtacnnaggatgacnnctcacatgnntttttttttttttttttttttttttttttt

SEQ ID NO: 4887 - DNA, 84 bp, Artificial
  Barcode component
  misc_feature (33)..(34): n is a, c, g, or t
  misc_feature (43)..(44): n is a, c, g, or t
  misc_feature (53)..(54): n is a, c, g, or t
tttttttaagcagtggtatcaacgcagagtacnnaggatgacnnactaggagnntttttttttttttttttttttttttttttt

SEQ ID NO: 4888 - DNA, 84 bp, Artificial
  Barcode component
  misc_feature (33)..(34): n is a, c, g, or t
  misc_feature (43)..(44): n is a, c, g, or t
  misc_feature (53)..(54): n is a, c, g, or t
tttttttaagcagtggtatcaacgcagagtacnnaggatgacnnccatagganntttttttttttttttttttttttttttttt

SEQ ID NO: 4889 - DNA, 84 bp, Artificial
  Barcode component
  misc_feature (33)..(34): n is a, c, g, or t
  misc_feature (43)..(44): n is a, c, g, or t
  misc_feature (53)..(54): n is a, c, g, or t
tttttttaagcagtggtatcaacgcagagtacnnaggatgacnnggagaatcnntttttttttttttttttttttttttttttt

SEQ ID NO: 4890 - DNA, 84 bp, Artificial
  Barcode component
  misc_feature (33)..(34): n is a, c, g, or t
  misc_feature (43)..(44): n is a, c, g, or t
  misc_feature (53)..(54): n is a, c, g, or t
tttttttaagcagtggtatcaacgcagagtacnnaggatgacnngccaagaanntttttttttttttttttttttttttttttt

SEQ ID NO: 4891 - DNA, 84 bp, Artificial
  Barcode component
  misc_feature (33)..(34): n is a, c, g, or t
  misc_feature (43)..(44): n is a, c, g, or t
  misc_feature (53)..(54): n is a, c, g, or t
tttttttaagcagtggtatcaacgcagagtacnnaggatgacnnaaggcaagnntttttttttttttttttttttttttttttt

SEQ ID NO: 4892 - DNA, 84 bp, Artificial
  Barcode component
  misc_feature (33)..(34): n is a, c, g, or t
  misc_feature (43)..(44): n is a, c, g, or t
  misc_feature (53)..(54): n is a, c, g, or t
tttttttaagcagtggtatcaacgcagagtacnnaggatgacnnaatgtcgcnntttttttttttttttttttttttttttttt

SEQ ID NO: 4893 - DNA, 84 bp, Artificial
  Barcode component
  misc_feature (33)..(34): n is a, c, g, or t
  misc_feature (43)..(44): n is a, c, g, or t
  misc_feature (53)..(54): n is a, c, g, or t
tttttttaagcagtggtatcaacgcagagtacnnaggatgacnnatggaaccnntttttttttttttttttttttttttttttt

SEQ ID NO: 4894 - DNA, 84 bp, Artificial
  Barcode component
  misc_feature (33)..(34): n is a, c, g, or t
  misc_feature (43)..(44): n is a, c, g, or t
  misc_feature (53)..(54): n is a, c, g, or t
tttttttaagcagtggtatcaacgcagagtacnnaggatgacnnagaggcatnntttttttttttttttttttttttttttttt

SEQ ID NO: 4895 - DNA, 84 bp, Artificial
  Barcode component
  misc_feature (33)..(34): n is a, c, g, or t
  misc_feature (43)..(44): n is a, c, g, or t
  misc_feature (53)..(54): n is a, c, g, or t
tttttttaagcagtggtatcaacgcagagtacnnaggatgacnntgcatagcnntttttttttttttttttttttttttttttt

SEQ ID NO: 4896 - DNA, 84 bp, Artificial
  Barcode component
  misc_feature (33)..(34): n is a, c, g, or t
  misc_feature (43)..(44): n is a, c, g, or t
  misc_feature (53)..(54): n is a, c, g, or t
tttttttaagcagtggtatcaacgcagagtacnnaggatgacnnctaacgganntttttttttttttttttttttttttttttt

SEQ ID NO: 4897 - DNA, 84 bp, Artificial
  Barcode component
  misc_feature (33)..(34): n is a, c, g, or t
  misc_feature (43)..(44): n is a, c, g, or t
  misc_feature (53)..(54): n is a, c, g, or t
tttttttaagcagtggtatcaacgcagagtacnnaggatgacnntatcgaggnntttttttttttttttttttttttttttttt

SEQ ID NO: 4898 - DNA, 84 bp, Artificial
  Barcode component
  misc_feature (33)..(34): n is a, c, g, or t
  misc_feature (43)..(44): n is a, c, g, or t
  misc_feature (53)..(54): n is a, c, g, or t
tttttttaagcagtggtatcaacgcagagtacnnaggatgacnncatagcctnntttttttttttttttttttttttttttttt

SEQ ID NO: 4899 - DNA, 84 bp, Artificial
  Barcode component
  misc_feature (33)..(34): n is a, c, g, or t
  misc_feature (43)..(44): n is a, c, g, or t
  misc_feature (53)..(54): n is a, c, g, or t
tttttttaagcagtggtatcaacgcagagtacnnaggatgacnnatcgagacnntttttttttttttttttttttttttttttt

SEQ ID NO: 4900 - DNA, 84 bp, Artificial
  Barcode component
  misc_feature (33)..(34): n is a, c, g, or t
  misc_feature (43)..(44): n is a, c, g, or t
  misc_feature (53)..(54): n is a, c, g, or t
tttttttaagcagtggtatcaacgcagagtacnnaggatgacnnggaagagtnntttttttttttttttttttttttttttttt

SEQ ID NO: 4901 - DNA, 84 bp, Artificial
  Barcode component
  misc_feature (33)..(34): n is a, c, g, or t
  misc_feature (43)..(44): n is a, c, g, or t
  misc_feature (53)..(54): n is a, c, g, or t
tttttttaagcagtggtatcaacgcagagtacnnaggatgacnnccaagtagnntttttttttttttttttttttttttttttt

SEQ ID NO: 4902 - DNA, 84 bp, Artificial
  Barcode component
  misc_feature (33)..(34): n is a, c, g, or t
  misc_feature (43)..(44): n is a, c, g, or t
  misc_feature (53)..(54): n is a, c, g, or t
tttttttaagcagtggtatcaacgcagagtacnnaggatgacnnctgaacagnntttttttttttttttttttttttttttttt

SEQ ID NO: 4903 - DNA, 84 bp, Artificial
  Barcode component
  misc_feature (33)..(34): n is a, c, g, or t
  misc_feature (43)..(44): n is a, c, g, or t
  misc_feature (53)..(54): n is a, c, g, or t
tttttttaagcagtggtatcaacgcagagtacnnaggatgacnngtaggttcnntttttttttttttttttttttttttttttt

SEQ ID NO: 4904 - DNA, 84 bp, Artificial
  Barcode component
  misc_feature (33)..(34): n is a, c, g, or t
  misc_feature (43)..(44): n is a, c, g, or t
  misc_feature (53)..(54): n is a, c, g, or t
tttttttaagcagtggtatcaacgcagagtacnnaggatgacnngtatggacnntttttttttttttttttttttttttttttt

SEQ ID NO: 4905 - DNA, 84 bp, Artificial
  Barcode component
  misc_feature (33)..(34): n is a, c, g, or t
  misc_feature (43)..(44): n is a, c, g, or t
  misc_feature (53)..(54): n is a, c, g, or t
tttttttaagcagtggtatcaacgcagagtacnnaggatgacnntcgcaacanntttttttttttttttttttttttttttttt

SEQ ID NO: 4906 - DNA, 84 bp, Artificial
  Barcode component
  misc_feature (33)..(34): n is a, c, g, or t
  misc_feature (43)..(44): n is a, c, g, or t
  misc_feature (53)..(54): n is a, c, g, or t
tttttttaagcagtggtatcaacgcagagtacnnaggatgacnnccgctaatnntttttttttttttttttttttttttttttt

SEQ ID NO: 4907 - DNA, 84 bp, Artificial
  Barcode component
  misc_feature (33)..(34): n is a, c, g, or t
  misc_feature (43)..(44): n is a, c, g, or t
  misc_feature (53)..(54): n is a, c, g, or t
tttttttaagcagtggtatcaacgcagagtacnnaggatgacnngattcgcanntttttttttttttttttttttttttttttt

SEQ ID NO: 4908 - DNA, 84 bp, Artificial
  Barcode component
  misc_feature (33)..(34): n is a, c, g, or t
  misc_feature (43)..(44): n is a, c, g, or t
  misc_feature (53)..(54): n is a, c, g, or t
tttttttaagcagtggtatcaacgcagagtacnnaggatgacnncgatggaanntttttttttttttttttttttttttttttt

SEQ ID NO: 4909 - DNA, 84 bp, Artificial
  Barcode component
  misc_feature (33)..(34): n is a, c, g, or t
  misc_feature (43)..(44): n is a, c, g, or t
  misc_feature (53)..(54): n is a, c, g, or t
tttttttaagcagtggtatcaacgcagagtacnnaggatgacnnagcaagganntttttttttttttttttttttttttttttt

SEQ ID NO: 4910 - DNA, 84 bp, Artificial
  Barcode component
  misc_feature (33)..(34): n is a, c, g, or t
  misc_feature (43)..(44): n is a, c, g, or t
  misc_feature (53)..(54): n is a, c, g, or t
tttttttaagcagtggtatcaacgcagagtacnnaggatgacnncgtagcaanntttttttttttttttttttttttttttttt

SEQ ID NO: 4911 - DNA, 84 bp, Artificial
  Barcode component
  misc_feature (33)..(34): n is a, c, g, or t
  misc_feature (43)..(44): n is a, c, g, or t
  misc_feature (53)..(54): n is a, c, g, or t
tttttttaagcagtggtatcaacgcagagtacnnaggatgacnntggcagtanntttttttttttttttttttttttttttttt

SEQ ID NO: 4912 - DNA, 84 bp, Artificial
  Barcode component
  misc_feature (33)..(34): n is a, c, g, or t
  misc_feature (43)..(44): n is a, c, g, or t
  misc_feature (53)..(54): n is a, c, g, or t
tttttttaagcagtggtatcaacgcagagtacnnaggatgacnncggtagttnntttttttttttttttttttttttttttttt

SEQ ID NO: 4913 - DNA, 84 bp, Artificial
  Barcode component
  misc_feature (33)..(34): n is a, c, g, or t
  misc_feature (43)..(44): n is a, c, g, or t
  misc_feature (53)..(54): n is a, c, g, or t
tttttttaagcagtggtatcaacgcagagtacnnaggatgacnntgacttcgnntttttttttttttttttttttttttttttt

SEQ ID NO: 4914 - DNA, 84 bp, Artificial
  Barcode component
  misc_feature (33)..(34): n is a, c, g, or t
  misc_feature (43)..(44): n is a, c, g, or t
  misc_feature (53)..(54): n is a, c, g, or t
tttttttaagcagtggtatcaacgcagagtacnnaggatgacnngagtgcaanntttttttttttttttttttttttttttttt

SEQ ID NO: 4915 - DNA, 84 bp, Artificial
  Barcode component
  misc_feature (33)..(34): n is a, c, g, or t
  misc_feature (43)..(44): n is a, c, g, or t
  misc_feature (53)..(54): n is a, c, g, or t
tttttttaagcagtggtatcaacgcagagtacnnaggatgacnnacggtaacnntttttttttttttttttttttttttttttt

SEQ ID NO: 4916 - DNA, 84 bp, Artificial
  Barcode component
  misc_feature (33)..(34): n is a, c, g, or t
  misc_feature (43)..(44): n is a, c, g, or t
  misc_feature (53)..(54): n is a, c, g, or t
tttttttaagcagtggtatcaacgcagagtacnnaggatgacnnaagtggtgnntttttttttttttttttttttttttttttt

SEQ ID NO: 4917 - DNA, 84 bp, Artificial
  Barcode component
  misc_feature (33)..(34): n is a, c, g, or t
  misc_feature (43)..(44): n is a, c, g, or t
  misc_feature (53)..(54): n is a, c, g, or t
tttttttaagcagtggtatcaacgcagagtacnnaggatgacnnggagacaanntttttttttttttttttttttttttttttt

SEQ ID NO: 4918 - DNA, 84 bp, Artificial
  Barcode component
  misc_feature (33)..(34): n is a, c, g, or t
  misc_feature (43)..(44): n is a, c, g, or t
  misc_feature (53)..(54): n is a, c, g, or t
tttttttaagcagtggtatcaacgcagagtacnnaggatgacnntcaaggacnntttttttttttttttttttttttttttttt

SEQ ID NO: 4919 - DNA, 84 bp, Artificial
  Barcode component
  misc_feature (33)..(34): n is a, c, g, or t
  misc_feature (43)..(44): n is a, c, g, or t
  misc_feature (53)..(54): n is a, c, g, or t
tttttttaagcagtggtatcaacgcagagtacnnaggatgacnnaagagagcnntttttttttttttttttttttttttttttt

SEQ ID NO: 4920 - DNA, 84 bp, Artificial
  Barcode component
  misc_feature (33)..(34): n is a, c, g, or t
  misc_feature (43)..(44): n is a, c, g, or t
  misc_feature (53)..(54): n is a, c, g, or t
tttttttaagcagtggtatcaacgcagagtacnnaggatgacnncgagagatnntttttttttttttttttttttttttttttt

SEQ ID NO: 4921 - DNA, 84 bp, Artificial
  Barcode component
  misc_feature (33)..(34): n is a, c, g, or t
  misc_feature (43)..(44): n is a, c, g, or t
  misc_feature (53)..(54): n is a, c, g, or t
tttttttaagcagtggtatcaacgcagagtacnnaggatgacnnacagatggnntttttttttttttttttttttttttttttt

SEQ ID NO: 4922 - DNA, 84 bp, Artificial
  Barcode component
  misc_feature (33)..(34): n is a, c, g, or t
  misc_feature (43)..(44): n is a, c, g, or t
  misc_feature (53)..(54): n is a, c, g, or t
tttttttaagcagtggtatcaacgcagagtacnnaggatgacnnaggagtcanntttttttttttttttttttttttttttttt

SEQ ID NO: 4923 - DNA, 84 bp, Artificial
  Barcode component
  misc_feature (33)..(34): n is a, c, g, or t
  misc_feature (43)..(44): n is a, c, g, or t
  misc_feature (53)..(54): n is a, c, g, or t
tttttttaagcagtggtatcaacgcagagtacnnaggatgacnncgtgttacnntttttttttttttttttttttttttttttt

SEQ ID NO: 4924 - DNA, 84 bp, Artificial
  Barcode component
  misc_feature (33)..(34): n is a, c, g, or t
  misc_feature (43)..(44): n is a, c, g, or t
  misc_feature (53)..(54): n is a, c, g, or t
tttttttaagcagtggtatcaacgcagagtacnnaggatgacnntagtgtgcnntttttttttttttttttttttttttttttt

SEQ ID NO: 4925 - DNA, 84 bp, Artificial
  Barcode component
  misc_feature (33)..(34): n is a, c, g, or t
  misc_feature (43)..(44): n is a, c, g, or t
  misc_feature (53)..(54): n is a, c, g, or t
tttttttaagcagtggtatcaacgcagagtacnnaggatgacnnctcatgacnntttttttttttttttttttttttttttttt

SEQ ID NO: 4926 - DNA, 84 bp, Artificial
  Barcode component
  misc_feature (33)..(34): n is a, c, g, or t
  misc_feature (43)..(44): n is a, c, g, or t
  misc_feature (53)..(54): n is a, c, g, or t
tttttttaagcagtggtatcaacgcagagtacnnaggatgacnngtatccagnntttttttttttttttttttttttttttttt

SEQ ID NO: 4927 - DNA, 84 bp, Artificial
  Barcode component
  misc_feature (33)..(34): n is a, c, g, or t
  misc_feature (43)..(44): n is a, c, g, or t
  misc_feature (53)..(54): n is a, c, g, or t
tttttttaagcagtggtatcaacgcagagtacnnaggatgacnnacgcctatnntttttttttttttttttttttttttttttt

SEQ ID NO: 4928 - DNA, 84 bp, Artificial
  Barcode component
  misc_feature (33)..(34): n is a, c, g, or t
  misc_feature (43)..(44): n is a, c, g, or t
  misc_feature (53)..(54): n is a, c, g, or t
tttttttaagcagtggtatcaacgcagagtacnnaggatgacnnaacgacctnntttttttttttttttttttttttttttttt

SEQ ID NO: 4929 - DNA, 84 bp, Artificial
  Barcode component
  misc_feature (33)..(34): n is a, c, g, or t
  misc_feature (43)..(44): n is a, c, g, or t
  misc_feature (53)..(54): n is a, c, g, or t
tttttttaagcagtggtatcaacgcagagtacnnaggatgacnnatcaggctnntttttttttttttttttttttttttttttt

SEQ ID NO: 4930 - DNA, 84 bp, Artificial
  Barcode component
  misc_feature (33)..(34): n is a, c, g, or t
  misc_feature (43)..(44): n is a, c, g, or t
  misc_feature (53)..(54): n is a, c, g, or t
tttttttaagcagtggtatcaacgcagagtacnnaggatgacnncaagttcgnntttttttttttttttttttttttttttttt

SEQ ID NO: 4931 - DNA, 84 bp, Artificial
  Barcode component
  misc_feature (33)..(34): n is a, c, g, or t
  misc_feature (43)..(44): n is a, c, g, or t
  misc_feature (53)..(54): n is a, c, g, or t
tttttttaagcagtggtatcaacgcagagtacnnaggatgacnntagccaganntttttttttttttttttttttttttttttt

SEQ ID NO: 4932 - DNA, 84 bp, Artificial
  Barcode component
  misc_feature (33)..(34): n is a, c, g, or t
  misc_feature (43)..(44): n is a, c, g, or t
  misc_feature (53)..(54): n is a, c, g, or t
tttttttaagcagtggtatcaacgcagagtacnnaggatgacnncaatcacgnntttttttttttttttttttttttttttttt

SEQ ID NO: 4933 - DNA, 84 bp, Artificial
  Barcode component
  misc_feature (33)..(34): n is a, c, g, or t
  misc_feature (43)..(44): n is a, c, g, or t
  misc_feature (53)..(54): n is a, c, g, or t
tttttttaagcagtggtatcaacgcagagtacnnaggatgacnngcaacaagnntttttttttttttttttttttttttttttt

SEQ ID NO: 4934 - DNA, 84 bp, Artificial
  Barcode component
  misc_feature (33)..(34): n is a, c, g, or t
  misc_feature (43)..(44): n is a, c, g, or t
  misc_feature (53)..(54): n is a, c, g, or t
tttttttaagcagtggtatcaacgcagagtacnnaggatgacnncacgacaanntttttttttttttttttttttttttttttt

SEQ ID NO: 4935 - DNA, 84 bp, Artificial
  Barcode component
  misc_feature (33)..(34): n is a, c, g, or t
  misc_feature (43)..(44): n is a, c, g, or t
  misc_feature (53)..(54): n is a, c, g, or t
tttttttaagcagtggtatcaacgcagagtacnnaggatgacnntacggaganntttttttttttttttttttttttttttttt

SEQ ID NO: 4936 - DNA, 84 bp, Artificial
  Barcode component
  misc_feature (33)..(34): n is a, c, g, or t
  misc_feature (43)..(44): n is a, c, g, or t
  misc_feature (53)..(54): n is a, c, g, or t
tttttttaagcagtggtatcaacgcagagtacnnaggatgacnncgacaaganntttttttttttttttttttttttttttttt

SEQ ID NO: 4937 - DNA, 84 bp, Artificial
  Barcode component
  misc_feature (33)..(34): n is a, c, g, or t
  misc_feature (43)..(44): n is a, c, g, or t
  misc_feature (53)..(54): n is a, c, g, or t
tttttttaagcagtggtatcaacgcagagtacnnaggatgacnncgaagtganntttttttttttttttttttttttttttttt

SEQ ID NO: 4938 - DNA, 84 bp, Artificial
  Barcode component
  misc_feature (33)..(34): n is a, c, g, or t
  misc_feature (43)..(44): n is a, c, g, or t
  misc_feature (53)..(54): n is a, c, g, or t
tttttttaagcagtggtatcaacgcagagtacnnaggatgacnnagctggtanntttttttttttttttttttttttttttttt

SEQ ID NO: 4939 - DNA, 84 bp, Artificial
  Barcode component
  misc_feature (33)..(34): n is a, c, g, or t
  misc_feature (43)..(44): n is a, c, g, or t
  misc_feature (53)..(54): n is a, c, g, or t
tttttttaagcagtggtatcaacgcagagtacnnaggatgacnnaactaggcnntttttttttttttttttttttttttttttt

SEQ ID NO: 4940 - DNA, 84 bp, Artificial
  Barcode component
  misc_feature (33)..(34): n is a, c, g, or t
  misc_feature (43)..(44): n is a, c, g, or t
  misc_feature (53)..(54): n is a, c, g, or t
tttttttaagcagtggtatcaacgcagagtacnnaggatgacnncagcaagtnntttttttttttttttttttttttttttttt

SEQ ID NO: 4941 - DNA, 84 bp, Artificial
  Barcode component
  misc_feature (33)..(34): n is a, c, g, or t
  misc_feature (43)..(44): n is a, c, g, or t
  misc_feature (53)..(54): n is a, c, g, or t
tttttttaagcagtggtatcaacgcagagtacnnaggatgacnnacgaggtanntttttttttttttttttttttttttttttt

SEQ ID NO: 4942 - DNA, 84 bp, Artificial
  Barcode component
  misc_feature (33)..(34): n is a, c, g, or t
  misc_feature (43)..(44): n is a, c, g, or t
  misc_feature (53)..(54): n is a, c, g, or t
tttttttaagcagtggtatcaacgcagagtacnnaggatgacnncatcttccnntttttttttttttttttttttttttttttt

SEQ ID NO: 4943 - DNA, 84 bp, Artificial
  Barcode component
  misc_feature (33)..(34): n is a, c, g, or t
  misc_feature (43)..(44): n is a, c, g, or t
  misc_feature (53)..(54): n is a, c, g, or t
tttttttaagcagtggtatcaacgcagagtacnnaggatgacnncctgaatcnntttttttttttttttttttttttttttttt

SEQ ID NO: 4944 - DNA, 84 bp, Artificial
  Barcode component
  misc_feature (33)..(34): n is a, c, g, or t
  misc_feature (43)..(44): n is a, c, g, or t
  misc_feature (53)..(54): n is a, c, g, or t
tttttttaagcagtggtatcaacgcagagtacnnaggatgacnntgcagactnntttttttttttttttttttttttttttttt

SEQ ID NO: 4945 - DNA, 84 bp, Artificial
  Barcode component
  misc_feature (33)..(34): n is a, c, g, or t
  misc_feature (43)..(44): n is a, c, g, or t
  misc_feature (53)..(54): n is a, c, g, or t
tttttttaagcagtggtatcaacgcagagtacnnaggatgacnnagatgtggnntttttttttttttttttttttttttttttt

SEQ ID NO: 4946 - DNA, 84 bp, Artificial
  Barcode component
  misc_feature (33)..(34): n is a, c, g, or t
  misc_feature (43)..(44): n is a, c, g, or t
  misc_feature (53)..(54): n is a, c, g, or t
tttttttaagcagtggtatcaacgcagagtacnnaggatgacnnagttcgacnntttttttttttttttttttttttttttttt

SEQ ID NO: 4947 - DNA, 84 bp, Artificial
  Barcode component
  misc_feature (33)..(34): n is a, c, g, or t
  misc_feature (43)..(44): n is a, c, g, or t
  misc_feature (53)..(54): n is a, c, g, or t
tttttttaagcagtggtatcaacgcagagtacnnaggatgacnnacaacctcnntttttttttttttttttttttttttttttt

SEQ ID NO: 4948 - DNA, 84 bp, Artificial
  Barcode component
  misc_feature (33)..(34): n is a, c, g, or t
  misc_feature (43)..(44): n is a, c, g, or t
  misc_feature (53)..(54): n is a, c, g, or t
tttttttaagcagtggtatcaacgcagagtacnnaggatgacnncatggtagnntttttttttttttttttttttttttttttt

SEQ ID NO: 4949 - DNA, 84 bp, Artificial
  Barcode component
  misc_feature (33)..(34): n is a, c, g, or t
  misc_feature (43)..(44): n is a, c, g, or t
  misc_feature (53)..(54): n is a, c, g, or t
tttttttaagcagtggtatcaacgcagagtacnnaggatgacnncgtatctcnntttttttttttttttttttttttttttttt

SEQ ID NO: 4950 - DNA, 84 bp, Artificial
  Barcode component
  misc_feature (33)..(34): n is a, c, g, or t
  misc_feature (43)..(44): n is a, c, g, or t
  misc_feature (53)..(54): n is a, c, g, or t
tttttttaagcagtggtatcaacgcagagtacnnaggatgacnncctagttcnntttttttttttttttttttttttttttttt

SEQ ID NO: 4951 - DNA, 84 bp, Artificial
  Barcode component
  misc_feature (33)..(34): n is a, c, g, or t
  misc_feature (43)..(44): n is a, c, g, or t
  misc_feature (53)..(54): n is a, c, g, or t
tttttttaagcagtggtatcaacgcagagtacnnaggatgacnncaagagtcnntttttttttttttttttttttttttttttt

SEQ ID NO: 4952 - DNA, 84 bp, Artificial
  Barcode component
  misc_feature (33)..(34): n is a, c, g, or t
  misc_feature (43)..(44): n is a, c, g, or t
  misc_feature (53)..(54): n is a, c, g, or t
tttttttaagcagtggtatcaacgcagagtacnnggtaggtannaatcggcanntttttttttttttttttttttttttttttt

SEQ ID NO: 4953 - DNA, 84 bp, Artificial
  Barcode component
  misc_feature (33)..(34): n is a, c, g, or t
  misc_feature (43)..(44): n is a, c, g, or t
  misc_feature (53)..(54): n is a, c, g, or t
tttttttaagcagtggtatcaacgcagagtacnnggtaggtanntacggcatnntttttttttttttttttttttttttttttt

SEQ ID NO: 4954 - DNA, 84 bp, Artificial
  Barcode component
  misc_feature (33)..(34): n is a, c, g, or t
  misc_feature (43)..(44): n is a, c, g, or t
  misc_feature (53)..(54): n is a, c, g, or t
tttttttaagcagtggtatcaacgcagagtacnnggtaggtannttggatcgnntttttttttttttttttttttttttttttt

SEQ ID NO: 4955 - DNA, 84 bp, Artificial
  Barcode component
  misc_feature (33)..(34): n is a, c, g, or t
  misc_feature (43)..(44): n is a, c, g, or t
  misc_feature (53)..(54): n is a, c, g, or t
tttttttaagcagtggtatcaacgcagagtacnnggtaggtanntggaacganntttttttttttttttttttttttttttttt

SEQ ID NO: 4956 - DNA, 84 bp, Artificial
  Barcode component
  misc_feature (33)..(34): n is a, c, g, or t
  misc_feature (43)..(44): n is a, c, g, or t
  misc_feature (53)..(54): n is a, c, g, or t
tttttttaagcagtggtatcaacgcagagtacnnggtaggtannggcaatcanntttttttttttttttttttttttttttttt

SEQ ID NO: 4957 - DNA, 84 bp, Artificial
  Barcode component
  misc_feature (33)..(34): n is a, c, g, or t
  misc_feature (43)..(44): n is a, c, g, or t
  misc_feature (53)..(54): n is a, c, g, or t
tttttttaagcagtggtatcaacgcagagtacnnggtaggtanngaatccganntttttttttttttttttttttttttttttt

SEQ ID NO: 4958 - DNA, 84 bp, Artificial
  Barcode component
  misc_feature (33)..(34): n is a, c, g, or t
  misc_feature (43)..(44): n is a, c, g, or t
  misc_feature (53)..(54): n is a, c, g, or t
tttttttaagcagtggtatcaacgcagagtacnnggtaggtannttacggtgnntttttttttttttttttttttttttttttt

SEQ ID NO: 4959 - DNA, 84 bp, Artificial
  Barcode component
  misc_feature (33)..(34): n is a, c, g, or t
  misc_feature (43)..(44): n is a, c, g, or t
  misc_feature (53)..(54): n is a, c, g, or t
tttttttaagcagtggtatcaacgcagagtacnnggtaggtanncatatcggnntttttttttttttttttttttttttttttt

SEQ ID NO: 4960 - DNA, 84 bp, Artificial
  Barcode component
  misc_feature (33)..(34): n is a, c, g, or t
  misc_feature (43)..(44): n is a, c, g, or t
  misc_feature (53)..(54): n is a, c, g, or t
tttttttaagcagtggtatcaacgcagagtacnnggtaggtanncttcggtanntttttttttttttttttttttttttttttt

SEQ ID NO: 4961 - DNA, 84 bp, Artificial
  Barcode component
  misc_feature (33)..(34): n is a, c, g, or t
  misc_feature (43)..(44): n is a, c, g, or t
  misc_feature (53)..(54): n is a, c, g, or t
tttttttaagcagtggtatcaacgcagagtacnnggtaggtanntcctaacgnntttttttttttttttttttttttttttttt

SEQ ID NO: 4962 - DNA, 84 bp, Artificial
  Barcode component
  misc_feature (33)..(34): n is a, c, g, or t
  misc_feature (43)..(44): n is a, c, g, or t
  misc_feature (53)..(54): n is a, c, g, or t
tttttttaagcagtggtatcaacgcagagtacnnggtaggtanngtaagccanntttttttttttttttttttttttttttttt

SEQ ID NO: 4963 - DNA, 84 bp, Artificial
  Barcode component
  misc_feature (33)..(34): n is a, c, g, or t
  misc_feature (43)..(44): n is a, c, g, or t
  misc_feature (53)..(54): n is a, c, g, or t
tttttttaagcagtggtatcaacgcagagtacnnggtaggtanntaaggtggnntttttttttttttttttttttttttttttt

SEQ ID NO: 4964 - DNA, 84 bp, Artificial
  Barcode component
  misc_feature (33)..(34): n is a, c, g, or t
  misc_feature (43)..(44): n is a, c, g, or t
  misc_feature (53)..(54): n is a, c, g, or t
tttttttaagcagtggtatcaacgcagagtacnnggtaggtannggtaagctnntttttttttttttttttttttttttttttt

SEQ ID NO: 4965 - DNA, 84 bp, Artificial
  Barcode component
  misc_feature (33)..(34): n is a, c, g, or t
  misc_feature (43)..(44): n is a, c, g, or t
  misc_feature (53)..(54): n is a, c, g, or t
tttttttaagcagtggtatcaacgcagagtacnnggtaggtanntgtgtcganntttttttttttttttttttttttttttttt

SEQ ID NO: 4966 - DNA, 84 bp, Artificial
  Barcode component
  misc_feature (33)..(34): n is a, c, g, or t
  misc_feature (43)..(44): n is a, c, g, or t
  misc_feature (53)..(54): n is a, c, g, or t
tttttttaagcagtggtatcaacgcagagtacnnggtaggtanngagcatganntttttttttttttttttttttttttttttt

SEQ ID NO: 4967 - DNA, 84 bp, Artificial
  Barcode component
  misc_feature (33)..(34): n is a, c, g, or t
  misc_feature (43)..(44): n is a, c, g, or t
  misc_feature (53)..(54): n is a, c, g, or t
tttttttaagcagtggtatcaacgcagagtacnnggtaggtanntcgaagtcnntttttttttttttttttttttttttttttt

SEQ ID NO: 4968 - DNA, 84 bp, Artificial
  Barcode component
  misc_feature (33)..(34): n is a, c, g, or t
  misc_feature (43)..(44): n is a, c, g, or t
  misc_feature (53)..(54): n is a, c, g, or t
tttttttaagcagtggtatcaacgcagagtacnnggtaggtannggtgaacanntttttttttttttttttttttttttttttt

SEQ ID NO: 4969 - DNA, 84 bp, Artificial
  Barcode component
  misc_feature (33)..(34): n is a, c, g, or t
  misc_feature (43)..(44): n is a, c, g, or t
  misc_feature (53)..(54): n is a, c, g, or t
tttttttaagcagtggtatcaacgcagagtacnnggtaggtannacatgcacnntttttttttttttttttttttttttttttt

SEQ ID NO: 4970 - DNA, 84 bp, Artificial
  Barcode component
  misc_feature (33)..(34): n is a, c, g, or t
  misc_feature (43)..(44): n is a, c, g, or t
  misc_feature (53)..(54): n is a, c, g, or t
tttttttaagcagtggtatcaacgcagagtacnnggtaggtannccaacagtnntttttttttttttttttttttttttttttt

SEQ ID NO: 4971 - DNA, 84 bp, Artificial
  Barcode component
  misc_feature (33)..(34): n is a, c, g, or t
  misc_feature (43)..(44): n is a, c, g, or t
  misc_feature (53)..(54): n is a, c, g, or t
tttttttaagcagtggtatcaacgcagagtacnnggtaggtannagaacagcnntttttttttttttttttttttttttttttt

SEQ ID NO: 4972 - DNA, 84 bp, Artificial
  Barcode component
  misc_feature (33)..(34): n is a, c, g, or t
  misc_feature (43)..(44): n is a, c, g, or t
  misc_feature (53)..(54): n is a, c, g, or t
tttttttaagcagtggtatcaacgcagagtacnnggtaggtanngaacacgtnntttttttttttttttttttttttttttttt

SEQ ID NO: 4973 - DNA, 84 bp, Artificial
  Barcode component
  misc_feature (33)..(34): n is a, c, g, or t
  misc_feature (43)..(44): n is a, c, g, or t
  misc_feature (53)..(54): n is a, c, g, or t
tttttttaagcagtggtatcaacgcagagtacnnggtaggtannggtcttcanntttttttttttttttttttttttttttttt

SEQ ID NO: 4974 - DNA, 84 bp, Artificial
  Barcode component
  misc_feature (33)..(34): n is a, c, g, or t
  misc_feature (43)..(44): n is a, c, g, or t
  misc_feature (53)..(54): n is a, c, g, or t
tttttttaagcagtggtatcaacgcagagtacnnggtaggtannaggttcagnntttttttttttttttttttttttttttttt

SEQ ID NO: 4975 - DNA, 84 bp, Artificial
  Barcode component
  misc_feature (33)..(34): n is a, c, g, or t
  misc_feature (43)..(44): n is a, c, g, or t
  misc_feature (53)..(54): n is a, c, g, or t
tttttttaagcagtggtatcaacgcagagtacnnggtaggtannctagagcanntttttttttttttttttttttttttttttt

SEQ ID NO: 4976 - DNA, 84 bp, Artificial
  Barcode component
  misc_feature (33)..(34): n is a, c, g, or t
  misc_feature (43)..(44): n is a, c, g, or t
  misc_feature (53)..(54): n is a, c, g, or t
tttttttaagcagtggtatcaacgcagagtacnnggtaggtanncttctagcnntttttttttttttttttttttttttttttt

SEQ ID NO: 4977 - DNA, 84 bp, Artificial
  Barcode component
  misc_feature (33)..(34): n is a, c, g, or t
  misc_feature (43)..(44): n is a, c, g, or t
  misc_feature (53)..(54): n is a, c, g, or t
tttttttaagcagtggtatcaacgcagagtacnnggtaggtanngagtaacgnntttttttttttttttttttttttttttttt

SEQ ID NO: 4978 - DNA, 84 bp, Artificial
  Barcode component
  misc_feature (33)..(34): n is a, c, g, or t
  misc_feature (43)..(44): n is a, c, g, or t
  misc_feature (53)..(54): n is a, c, g, or t
tttttttaagcagtggtatcaacgcagagtacnnggtaggtannctaagaggnntttttttttttttttttttttttttttttt

SEQ ID NO: 4979 - DNA, 84 bp, Artificial
  Barcode component
  misc_feature (33)..(34): n is a, c, g, or t
  misc_feature (43)..(44): n is a, c, g, or t
  misc_feature (53)..(54): n is a, c, g, or t
tttttttaagcagtggtatcaacgcagagtacnnggtaggtannacgtgtagnntttttttttttttttttttttttttttttt

SEQ ID NO: 4980 - DNA, 84 bp, Artificial
  Barcode component
  misc_feature (33)..(34): n is a, c, g, or t
  misc_feature (43)..(44): n is a, c, g, or t
  misc_feature (53)..(54): n is a, c, g, or t
tttttttaagcagtggtatcaacgcagagtacnnggtaggtannactacaggnntttttttttttttttttttttttttttttt

SEQ ID NO: 4981 - DNA, 84 bp, Artificial
  Barcode component
  misc_feature (33)..(34): n is a, c, g, or t
  misc_feature (43)..(44): n is a, c, g, or t
  misc_feature (53)..(54): n is a, c, g, or t
tttttttaagcagtggtatcaacgcagagtacnnggtaggtanntacaggtcnntttttttttttttttttttttttttttttt

SEQ ID NO: 4982 - DNA, 84 bp, Artificial
  Barcode component
  misc_feature (33)..(34): n is a, c, g, or t
  misc_feature (43)..(44): n is a, c, g, or t
  misc_feature (53)..(54): n is a, c, g, or t
tttttttaagcagtggtatcaacgcagagtacnnggtaggtannctcacatgnntttttttttttttttttttttttttttttt

SEQ ID NO: 4983 - DNA, 84 bp, Artificial
  Barcode component
  misc_feature (33)..(34): n is a, c, g, or t
  misc_feature (43)..(44): n is a, c, g, or t
  misc_feature (53)..(54): n is a, c, g, or t
tttttttaagcagtggtatcaacgcagagtacnnggtaggtannactaggagnntttttttttttttttttttttttttttttt

SEQ ID NO: 4984 - DNA, 84 bp, Artificial
  Barcode component
  misc_feature (33)..(34): n is a, c, g, or t
  misc_feature (43)..(44): n is a, c, g, or t
  misc_feature (53)..(54): n is a, c, g, or t
tttttttaagcagtggtatcaacgcagagtacnnggtaggtannccatagganntttttttttttttttttttttttttttttt

SEQ ID NO: 4985 - DNA, 84 bp, Artificial
  Barcode component
  misc_feature (33)..(34): n is a, c, g, or t
  misc_feature (43)..(44): n is a, c, g, or t
  misc_feature (53)..(54): n is a, c, g, or t
tttttttaagcagtggtatcaacgcagagtacnnggtaggtannggagaatcnntttttttttttttttttttttttttttttt

SEQ ID NO: 4986 - DNA, 84 bp, Artificial
  Barcode component
  misc_feature (33)..(34): n is a, c, g, or t
  misc_feature (43)..(44): n is a, c, g, or t
  misc_feature (53)..(54): n is a, c, g, or t
tttttttaagcagtggtatcaacgcagagtacnnggtaggtanngccaagaanntttttttttttttttttttttttttttttt

SEQ ID NO: 4987 - DNA, 84 bp, Artificial
  Barcode component
  misc_feature (33)..(34): n is a, c, g, or t
  misc_feature (43)..(44): n is a, c, g, or t
  misc_feature (53)..(54): n is a, c, g, or t
tttttttaagcagtggtatcaacgcagagtacnnggtaggtannaaggcaagnntttttttttttttttttttttttttttttt

SEQ ID NO: 4988 - DNA, 84 bp, Artificial
  Barcode component
  misc_feature (33)..(34): n is a, c, g, or t
  misc_feature (43)..(44): n is a, c, g, or t
  misc_feature (53)..(54): n is a, c, g, or t
tttttttaagcagtggtatcaacgcagagtacnnggtaggtannaatgtcgcnntttttttttttttttttttttttttttttt

SEQ ID NO: 4989 - DNA, 84 bp, Artificial
  Barcode component
  misc_feature (33)..(34): n is a, c, g, or t
  misc_feature (43)..(44): n is a, c, g, or t
  misc_feature (53)..(54): n is a, c, g, or t
tttttttaagcagtggtatcaacgcagagtacnnggtaggtannatggaaccnntttttttttttttttttttttttttttttt

SEQ ID NO: 4990 - DNA, 84 bp, Artificial
  Barcode component
  misc_feature (33)..(34): n is a, c, g, or t
  misc_feature (43)..(44): n is a, c, g, or t
  misc_feature (53)..(54): n is a, c, g, or t
tttttttaagcagtggtatcaacgcagagtacnnggtaggtannagaggcatnntttttttttttttttttttttttttttttt

SEQ ID NO: 4991 - DNA, 84 bp, Artificial
  Barcode component
  misc_feature (33)..(34): n is a, c, g, or t
  misc_feature (43)..(44): n is a, c, g, or t
  misc_feature (53)..(54): n is a, c, g, or t
tttttttaagcagtggtatcaacgcagagtacnnggtaggtanntgcatagcnntttttttttttttttttttttttttttttt

SEQ ID NO: 4992 - DNA, 84 bp, Artificial
  Barcode component
  misc_feature (33)..(34): n is a, c, g, or t
  misc_feature (43)..(44): n is a, c, g, or t
  misc_feature (53)..(54): n is a, c, g, or t
tttttttaagcagtggtatcaacgcagagtacnnggtaggtannctaacgganntttttttttttttttttttttttttttttt

SEQ ID NO: 4993 - DNA, 84 bp, Artificial
  Barcode component
  misc_feature (33)..(34): n is a, c, g, or t
  misc_feature (43)..(44): n is a, c, g, or t
  misc_feature (53)..(54): n is a, c, g, or t
tttttttaagcagtggtatcaacgcagagtacnnggtaggtanntatcgaggnntttttttttttttttttttttttttttttt

SEQ ID NO: 4994 - DNA, 84 bp, Artificial
  Barcode component
  misc_feature (33)..(34): n is a, c, g, or t
  misc_feature (43)..(44): n is a, c, g, or t
  misc_feature (53)..(54): n is a, c, g, or t
tttttttaagcagtggtatcaacgcagagtacnnggtaggtanncatagcctnntttttttttttttttttttttttttttttt

SEQ ID NO: 4995 - DNA, 84 bp, Artificial
  Barcode component
  misc_feature (33)..(34): n is a, c, g, or t
  misc_feature (43)..(44): n is a, c, g, or t
  misc_feature (53)..(54): n is a, c, g, or t
tttttttaagcagtggtatcaacgcagagtacnnggtaggtannatcgagacnntttttttttttttttttttttttttttttt

SEQ ID NO: 4996 - DNA, 84 bp, Artificial
  Barcode component
  misc_feature (33)..(34): n is a, c, g, or t
  misc_feature (43)..(44): n is a, c, g, or t
  misc_feature (53)..(54): n is a, c, g, or t
tttttttaagcagtggtatcaacgcagagtacnnggtaggtannggaagagtnntttttttttttttttttttttttttttttt

SEQ ID NO: 4997 - DNA, 84 bp, Artificial
  Barcode component
  misc_feature (33)..(34): n is a, c, g, or t
  misc_feature (43)..(44): n is a, c, g, or t
  misc_feature (53)..(54): n is a, c, g, or t
tttttttaagcagtggtatcaacgcagagtacnnggtaggtannccaagtagnntttttttttttttttttttttttttttttt

SEQ ID NO: 4998 - DNA, 84 bp, Artificial
  Barcode component
  misc_feature (33)..(34): n is a, c, g, or t
  misc_feature (43)..(44): n is a, c, g, or t
  misc_feature (53)..(54): n is a, c, g, or t
tttttttaagcagtggtatcaacgcagagtacnnggtaggtannctgaacagnntttttttttttttttttttttttttttttt

SEQ ID NO: 4999 - DNA, 84 bp, Artificial
  Barcode component
  misc_feature (33)..(34): n is a, c, g, or t
  misc_feature (43)..(44): n is a, c, g, or t
  misc_feature (53)..(54): n is a, c, g, or t
tttttttaagcagtggtatcaacgcagagtacnnggtaggtanngtaggttcnntttttttttttttttttttttttttttttt

SEQ ID NO: 5000 - DNA, 84 bp, Artificial
  Barcode component
  misc_feature (33)..(34): n is a, c, g, or t
  misc_feature (43)..(44): n is a, c, g, or t
  misc_feature (53)..(54): n is a, c, g, or t
tttttttaagcagtggtatcaacgcagagtacnnggtaggtanngtatggacnntttttttttttttttttttttttttttttt

SEQ ID NO: 5001 - DNA, 84 bp, Artificial
  Barcode component
  misc_feature (33)..(34): n is a, c, g, or t
  misc_feature (43)..(44): n is a, c, g, or t
  misc_feature (53)..(54): n is a, c, g, or t
tttttttaagcagtggtatcaacgcagagtacnnggtaggtanntcgcaacanntttttttttttttttttttttttttttttt

SEQ ID NO: 5002 - DNA, 84 bp, Artificial
  Barcode component
  misc_feature (33)..(34): n is a, c, g, or t
  misc_feature (43)..(44): n is a, c, g, or t
  misc_feature (53)..(54): n is a, c, g, or t
tttttttaagcagtggtatcaacgcagagtacnnggtaggtannccgctaatnntttttttttttttttttttttttttttttt

SEQ ID NO: 5003 - DNA, 84 bp, Artificial
  Barcode component
  misc_feature (33)..(34): n is a, c, g, or t
  misc_feature (43)..(44): n is a, c, g, or t
  misc_feature (53)..(54): n is a, c, g, or t
tttttttaagcagtggtatcaacgcagagtacnnggtaggtanngattcgcanntttttttttttttttttttttttttttttt

SEQ ID NO: 5004 - DNA, 84 bp, Artificial
  Barcode component
  misc_feature (33)..(34): n is a, c, g, or t
  misc_feature (43)..(44): n is a, c, g, or t
  misc_feature (53)..(54): n is a, c, g, or t
tttttttaagcagtggtatcaacgcagagtacnnggtaggtanncgatggaanntttttttttttttttttttttttttttttt

SEQ ID NO: 5005 - DNA, 84 bp, Artificial
  Barcode component
  misc_feature (33)..(34): n is a, c, g, or t
  misc_feature (43)..(44): n is a, c, g, or t
  misc_feature (53)..(54): n is a, c, g, or t
tttttttaagcagtggtatcaacgcagagtacnnggtaggtannagcaagganntttttttttttttttttttttttttttttt

SEQ ID NO: 5006 - DNA, 84 bp, Artificial
  Barcode component
  misc_feature (33)..(34): n is a, c, g, or t
  misc_feature (43)..(44): n is a, c, g, or t
  misc_feature (53)..(54): n is a, c, g, or t
tttttttaagcagtggtatcaacgcagagtacnnggtaggtanncgtagcaanntttttttttttttttttttttttttttttt

SEQ ID NO: 5007 - DNA, 84 bp, Artificial
  Barcode component
  misc_feature (33)..(34): n is a, c, g, or t
  misc_feature (43)..(44): n is a, c, g, or t
  misc_feature (53)..(54): n is a, c, g, or t
tttttttaagcagtggtatcaacgcagagtacnnggtaggtanntggcagtanntttttttttttttttttttttttttttttt

SEQ ID NO: 5008 - DNA, 84 bp, Artificial
  Barcode component
  misc_feature (33)..(34): n is a, c, g, or t
  misc_feature (43)..(44): n is a, c, g, or t
  misc_feature (53)..(54): n is a, c, g, or t
tttttttaagcagtggtatcaacgcagagtacnnggtaggtanncggtagttnntttttttttttttttttttttttttttttt

SEQ ID NO: 5009 - DNA, 84 bp, Artificial
  Barcode component
  misc_feature (33)..(34): n is a, c, g, or t
  misc_feature (43)..(44): n is a, c, g, or t
  misc_feature (53)..(54): n is a, c, g, or t
tttttttaagcagtggtatcaacgcagagtacnnggtaggtanntgacttcgnntttttttttttttttttttttttttttttt

SEQ ID NO: 5010 - DNA, 84 bp, Artificial
  Barcode component
  misc_feature (33)..(34): n is a, c, g, or t
  misc_feature (43)..(44): n is a, c, g, or t
  misc_feature (53)..(54): n is a, c, g, or t
tttttttaagcagtggtatcaacgcagagtacnnggtaggtanngagtgcaanntttttttttttttttttttttttttttttt

SEQ ID NO: 5011 - DNA, 84 bp, Artificial
  Barcode component
  misc_feature (33)..(34): n is a, c, g, or t
  misc_feature (43)..(44): n is a, c, g, or t
  misc_feature (53)..(54): n is a, c, g, or t
tttttttaagcagtggtatcaacgcagagtacnnggtaggtannacggtaacnntttttttttttttttttttttttttttttt

SEQ ID NO: 5012 - DNA, 84 bp, Artificial
  Barcode component
  misc_feature (33)..(34): n is a, c, g, or t
  misc_feature (43)..(44): n is a, c, g, or t
  misc_feature (53)..(54): n is a, c, g, or t
tttttttaagcagtggtatcaacgcagagtacnnggtaggtannaagtggtgnntttttttttttttttttttttttttttttt

SEQ ID NO: 5013 - DNA, 84 bp, Artificial
  Barcode component
  misc_feature (33)..(34): n is a, c, g, or t
  misc_feature (43)..(44): n is a, c, g, or t
  misc_feature (53)..(54): n is a, c, g, or t
tttttttaagcagtggtatcaacgcagagtacnnggtaggtannggagacaanntttttttttttttttttttttttttttttt

SEQ ID NO: 5014 - DNA, 84 bp, Artificial
  Barcode component
  misc_feature (33)..(34): n is a, c, g, or t
  misc_feature (43)..(44): n is a, c, g, or t
  misc_feature (53)..(54): n is a, c, g, or t
tttttttaagcagtggtatcaacgcagagtacnnggtaggtanntcaaggacnntttttttttttttttttttttttttttttt

SEQ ID NO: 5015 - DNA, 84 bp, Artificial
  Barcode component
  misc_feature (33)..(34): n is a, c, g, or t
  misc_feature (43)..(44): n is a, c, g, or t
  misc_feature (53)..(54): n is a, c, g, or t
tttttttaagcagtggtatcaacgcagagtacnnggtaggtannaagagagcnntttttttttttttttttttttttttttttt

SEQ ID NO: 5016 - DNA, 84 bp, Artificial
  Barcode component
  misc_feature (33)..(34): n is a, c, g, or t
  misc_feature (43)..(44): n is a, c, g, or t
  misc_feature (53)..(54): n is a, c, g, or t
tttttttaagcagtggtatcaacgcagagtacnnggtaggtanncgagagatnntttttttttttttttttttttttttttttt

SEQ ID NO: 5017 - DNA, 84 bp, Artificial
  Barcode component
  misc_feature (33)..(34): n is a, c, g, or t
  misc_feature (43)..(44): n is a, c, g, or t
  misc_feature (53)..(54): n is a, c, g, or t
tttttttaagcagtggtatcaacgcagagtacnnggtaggtannacagatggnntttttttttttttttttttttttttttttt

SEQ ID NO: 5018 - DNA, 84 bp, Artificial
  Barcode component
  misc_feature (33)..(34): n is a, c, g, or t
  misc_feature (43)..(44): n is a, c, g, or t
  misc_feature (53)..(54): n is a, c, g, or t
tttttttaagcagtggtatcaacgcagagtacnnggtaggtannaggagtcanntttttttttttttttttttttttttttttt

SEQ ID NO: 5019 - DNA, 84 bp, Artificial
  Barcode component
  misc_feature (33)..(34): n is a, c, g, or t
  misc_feature (43)..(44): n is a, c, g, or t
  misc_feature (53)..(54): n is a, c, g, or t
tttttttaagcagtggtatcaacgcagagtacnnggtaggtanncgtgttacnntttttttttttttttttttttttttttttt

SEQ ID NO: 5020 - DNA, 84 bp, Artificial
  Barcode component
  misc_feature (33)..(34): n is a, c, g, or t
  misc_feature (43)..(44): n is a, c, g, or t
  misc_feature (53)..(54): n is a, c, g, or t
tttttttaagcagtggtatcaacgcagagtacnnggtaggtanntagtgtgcnntttttttttttttttttttttttttttttt

SEQ ID NO: 5021 - DNA, 84 bp, Artificial
  Barcode component
  misc_feature (33)..(34): n is a, c, g, or t
  misc_feature (43)..(44): n is a, c, g, or t
  misc_feature (53)..(54): n is a, c, g, or t
tttttttaagcagtggtatcaacgcagagtacnnggtaggtannctcatgacnntttttttttttttttttttttttttttttt

SEQ ID NO: 5022 - DNA, 84 bp, Artificial
  Barcode component
  misc_feature (33)..(34): n is a, c, g, or t
  misc_feature (43)..(44): n is a, c, g, or t
  misc_feature (53)..(54): n is a, c, g, or t
tttttttaagcagtggtatcaacgcagagtacnnggtaggtanngtatccagnntttttttttttttttttttttttttttttt

SEQ ID NO: 5023 - DNA, 84 bp, Artificial
  Barcode component
  misc_feature (33)..(34): n is a, c, g, or t
  misc_feature (43)..(44): n is a, c, g, or t
  misc_feature (53)..(54): n is a, c, g, or t
tttttttaagcagtggtatcaacgcagagtacnnggtaggtannacgcctatnntttttttttttttttttttttttttttttt

SEQ ID NO: 5024 - DNA, 84 bp, Artificial
  Barcode component
  misc_feature (33)..(34): n is a, c, g, or t
  misc_feature (43)..(44): n is a, c, g, or t
  misc_feature (53)..(54): n is a, c, g, or t
tttttttaagcagtggtatcaacgcagagtacnnggtaggtannaacgacctnntttttttttttttttttttttttttttttt

SEQ ID NO: 5025 - DNA, 84 bp, Artificial
  Barcode component
  misc_feature (33)..(34): n is a, c, g, or t
  misc_feature (43)..(44): n is a, c, g, or t
  misc_feature (53)..(54): n is a, c, g, or t
tttttttaagcagtggtatcaacgcagagtacnnggtaggtannatcaggctnntttttttttttttttttttttttttttttt

SEQ ID NO: 5026 - DNA, 84 bp, Artificial
  Barcode component
  misc_feature (33)..(34): n is a, c, g, or t
  misc_feature (43)..(44): n is a, c, g, or t
  misc_feature (53)..(54): n is a, c, g, or t
tttttttaagcagtggtatcaacgcagagtacnnggtaggtanncaagttcgnntttttttttttttttttttttttttttttt

SEQ ID NO: 5027 - DNA, 84 bp, Artificial
  Barcode component
  misc_feature (33)..(34): n is a, c, g, or t
  misc_feature (43)..(44): n is a, c, g, or t
  misc_feature (53)..(54): n is a, c, g, or t
tttttttaagcagtggtatcaacgcagagtacnnggtaggtanntagccaganntttttttttttttttttttttttttttttt

SEQ ID NO: 5028 - DNA, 84 bp, Artificial
  Barcode component
  misc_feature (33)..(34): n is a, c, g, or t
  misc_feature (43)..(44): n is a, c, g, or t
  misc_feature (53)..(54): n is a, c, g, or t
tttttttaagcagtggtatcaacgcagagtacnnggtaggtanncaatcacgnntttttttttttttttttttttttttttttt

SEQ ID NO: 5029 - DNA, 84 bp, Artificial
  Barcode component
  misc_feature (33)..(34): n is a, c, g, or t
  misc_feature (43)..(44): n is a, c, g, or t
  misc_feature (53)..(54): n is a, c, g, or t
tttttttaagcagtggtatcaacgcagagtacnnggtaggtanngcaacaagnntttttttttttttttttttttttttttttt

SEQ ID NO: 5030 - DNA, 84 bp, Artificial
  Barcode component
  misc_feature (33)..(34): n is a, c, g, or t
  misc_feature (43)..(44): n is a, c, g, or t
  misc_feature (53)..(54): n is a, c, g, or t
tttttttaagcagtggtatcaacgcagagtacnnggtaggtanncacgacaanntttttttttttttttttttttttttttttt

SEQ ID NO: 5031 - DNA, 84 bp, Artificial
  Barcode component
  misc_feature (33)..(34): n is a, c, g, or t
  misc_feature (43)..(44): n is a, c, g, or t
  misc_feature (53)..(54): n is a, c, g, or t
tttttttaagcagtggtatcaacgcagagtacnnggtaggtanntacggaganntttttttttttttttttttttttttttttt

SEQ ID NO: 5032 - DNA, 84 bp, Artificial
  Barcode component
  misc_feature (33)..(34): n is a, c, g, or t
  misc_feature (43)..(44): n is a, c, g, or t
  misc_feature (53)..(54): n is a, c, g, or t
tttttttaagcagtggtatcaacgcagagtacnnggtaggtanncgacaaganntttttttttttttttttttttttttttttt

SEQ ID NO: 5033 - DNA, 84 bp, Artificial
  Barcode component
  misc_feature (33)..(34): n is a, c, g, or t
  misc_feature (43)..(44): n is a, c, g, or t
  misc_feature (53)..(54): n is a, c, g, or t
tttttttaagcagtggtatcaacgcagagtacnnggtaggtanncgaagtganntttttttttttttttttttttttttttttt

SEQ ID NO: 5034 - DNA, 84 bp, Artificial
  Barcode component
  misc_feature (33)..(34): n is a, c, g, or t
  misc_feature (43)..(44): n is a, c, g, or t
  misc_feature (53)..(54): n is a, c, g, or t
tttttttaagcagtggtatcaacgcagagtacnnggtaggtannagctggtanntttttttttttttttttttttttttttttt

SEQ ID NO: 5035 - DNA, 84 bp, Artificial
  Barcode component
  misc_feature (33)..(34): n is a, c, g, or t
  misc_feature (43)..(44): n is a, c, g, or t
  misc_feature (53)..(54): n is a, c, g, or t
tttttttaagcagtggtatcaacgcagagtacnnggtaggtannaactaggcnntttttttttttttttttttttttttttttt

SEQ ID NO: 5036 - DNA, 84 bp, Artificial
  Barcode component
  misc_feature (33)..(34): n is a, c, g, or t
  misc_feature (43)..(44): n is a, c, g, or t
  misc_feature (53)..(54): n is a, c, g, or t
tttttttaagcagtggtatcaacgcagagtacnnggtaggtanncagcaagtnntttttttttttttttttttttttttttttt

SEQ ID NO: 5037 - DNA, 84 bp, Artificial
  Barcode component
  misc_feature (33)..(34): n is a, c, g, or t
  misc_feature (43)..(44): n is a, c, g, or t
  misc_feature (53)..(54): n is a, c, g, or t
tttttttaagcagtggtatcaacgcagagtacnnggtaggtannacgaggtanntttttttttttttttttttttttttttttt

SEQ ID NO: 5038 - DNA, 84 bp, Artificial
  Barcode component
  misc_feature (33)..(34): n is a, c, g, or t
  misc_feature (43)..(44): n is a, c, g, or t
  misc_feature (53)..(54): n is a, c, g, or t
tttttttaagcagtggtatcaacgcagagtacnnggtaggtanncatcttccnntttttttttttttttttttttttttttttt

SEQ ID NO: 5039 - DNA, 84 bp, Artificial
  Barcode component
  misc_feature (33)..(34): n is a, c, g, or t
  misc_feature (43)..(44): n is a, c, g, or t
  misc_feature (53)..(54): n is a, c, g, or t
tttttttaagcagtggtatcaacgcagagtacnnggtaggtanncctgaatcnntttttttttttttttttttttttttttttt

SEQ ID NO: 5040 - DNA, 84 bp, Artificial
  Barcode component
  misc_feature (33)..(34): n is a, c, g, or t
  misc_feature (43)..(44): n is a, c, g, or t
  misc_feature (53)..(54): n is a, c, g, or t
tttttttaagcagtggtatcaacgcagagtacnnggtaggtanntgcagactnntttttttttttttttttttttttttttttt

SEQ ID NO: 5041 - DNA, 84 bp, Artificial
  Barcode component
  misc_feature (33)..(34): n is a, c, g, or t
  misc_feature (43)..(44): n is a, c, g, or t
  misc_feature (53)..(54): n is a, c, g, or t
tttttttaagcagtggtatcaacgcagagtacnnggtaggtannagatgtggnntttttttttttttttttttttttttttttt

SEQ ID NO: 5042 - DNA, 84 bp, Artificial
  Barcode component
  misc_feature (33)..(34): n is a, c, g, or t
  misc_feature (43)..(44): n is a, c, g, or t
  misc_feature (53)..(54): n is a, c, g, or t
tttttttaagcagtggtatcaacgcagagtacnnggtaggtannagttcgacnntttttttttttttttttttttttttttttt

SEQ ID NO: 5043 - DNA, 84 bp, Artificial
  Barcode component
  misc_feature (33)..(34): n is a, c, g, or t
  misc_feature (43)..(44): n is a, c, g, or t
  misc_feature (53)..(54): n is a, c, g, or t
tttttttaagcagtggtatcaacgcagagtacnnggtaggtannacaacctcnntttttttttttttttttttttttttttttt

SEQ ID NO: 5044 - DNA, 84 bp, Artificial
  Barcode component
  misc_feature (33)..(34): n is a, c, g, or t
  misc_feature (43)..(44): n is a, c, g, or t
  misc_feature (53)..(54): n is a, c, g, or t
tttttttaagcagtggtatcaacgcagagtacnnggtaggtanncatggtagnntttttttttttttttttttttttttttttt

SEQ ID NO: 5045 - DNA, 84 bp, Artificial
  Barcode component
  misc_feature (33)..(34): n is a, c, g, or t
  misc_feature (43)..(44): n is a, c, g, or t
  misc_feature (53)..(54): n is a, c, g, or t
tttttttaagcagtggtatcaacgcagagtacnnggtaggtanncgtatctcnntttttttttttttttttttttttttttttt

SEQ ID NO: 5046 - DNA, 84 bp, Artificial
  Barcode component
  misc_feature (33)..(34): n is a, c, g, or t
  misc_feature (43)..(44): n is a, c, g, or t
  misc_feature (53)..(54): n is a, c, g, or t
tttttttaagcagtggtatcaacgcagagtacnnggtaggtanncctagttcnntttttttttttttttttttttttttttttt

SEQ ID NO: 5047 - DNA, 84 bp, Artificial
  Barcode component
  misc_feature (33)..(34): n is a, c, g, or t
  misc_feature (43)..(44): n is a, c, g, or t
  misc_feature (53)..(54): n is a, c, g, or t
tttttttaagcagtggtatcaacgcagagtacnnggtaggtanncaagagtcnntttttttttttttttttttttttttttttt

SEQ ID NO: 5048 - DNA, 84 bp, Artificial
  Barcode component
  misc_feature (33)..(34): n is a, c, g, or t
  misc_feature (43)..(44): n is a, c, g, or t
  misc_feature (53)..(54): n is a, c, g, or t
tttttttaagcagtggtatcaacgcagagtacnngacaagtgnnaatcggcanntttttttttttttttttttttttttttttt

SEQ ID NO: 5049 - DNA, 84 bp, Artificial
  Barcode component
  misc_feature (33)..(34): n is a, c, g, or t
  misc_feature (43)..(44): n is a, c, g, or t
  misc_feature (53)..(54): n is a, c, g, or t
tttttttaagcagtggtatcaacgcagagtacnngacaagtgnntacggcatnntttttttttttttttttttttttttttttt

SEQ ID NO: 5050 - DNA, 84 bp, Artificial
  Barcode component
  misc_feature (33)..(34): n is a, c, g, or t
  misc_feature (43)..(44): n is a, c, g, or t
  misc_feature (53)..(54): n is a, c, g, or t
tttttttaagcagtggtatcaacgcagagtacnngacaagtgnnttggatcgnntttttttttttttttttttttttttttttt

SEQ ID NO: 5051 - DNA, 84 bp, Artificial
  Barcode component
  misc_feature (33)..(34): n is a, c, g, or t
  misc_feature (43)..(44): n is a, c, g, or t
  misc_feature (53)..(54): n is a, c, g, or t
tttttttaagcagtggtatcaacgcagagtacnngacaagtgnntggaacganntttttttttttttttttttttttttttttt

SEQ ID NO: 5052 - DNA, 84 bp, Artificial
  Barcode component
  misc_feature (33)..(34): n is a, c, g, or t
  misc_feature (43)..(44): n is a, c, g, or t
  misc_feature (53)..(54): n is a, c, g, or t
tttttttaagcagtggtatcaacgcagagtacnngacaagtgnnggcaatcanntttttttttttttttttttttttttttttt

SEQ ID NO: 5053 - DNA, 84 bp, Artificial
  Barcode component
  misc_feature (33)..(34): n is a, c, g, or t
  misc_feature (43)..(44): n is a, c, g, or t
  misc_feature (53)..(54): n is a, c, g, or t
tttttttaagcagtggtatcaacgcagagtacnngacaagtgnngaatccganntttttttttttttttttttttttttttttt

SEQ ID NO: 5054 - DNA, 84 bp, Artificial
  Barcode component
  misc_feature (33)..(34): n is a, c, g, or t
  misc_feature (43)..(44): n is a, c, g, or t
  misc_feature (53)..(54): n is a, c, g, or t
tttttttaagcagtggtatcaacgcagagtacnngacaagtgnnttacggtgnntttttttttttttttttttttttttttttt

SEQ ID NO: 5055 - DNA, 84 bp, Artificial
  Barcode component
  misc_feature (33)..(34): n is a, c, g, or t
  misc_feature (43)..(44): n is a, c, g, or t
  misc_feature (53)..(54): n is a, c, g, or t
tttttttaagcagtggtatcaacgcagagtacnngacaagtgnncatatcggnntttttttttttttttttttttttttttttt

SEQ ID NO: 5056 - DNA, 84 bp, Artificial
  Barcode component
  misc_feature (33)..(34): n is a, c, g, or t
  misc_feature (43)..(44): n is a, c, g, or t
  misc_feature (53)..(54): n is a, c, g, or t
tttttttaagcagtggtatcaacgcagagtacnngacaagtgnncttcggtanntttttttttttttttttttttttttttttt

SEQ ID NO: 5057 - DNA, 84 bp, Artificial
  Barcode component
  misc_feature (33)..(34): n is a, c, g, or t
  misc_feature (43)..(44): n is a, c, g, or t
  misc_feature (53)..(54): n is a, c, g, or t
tttttttaagcagtggtatcaacgcagagtacnngacaagtgnntcctaacgnntttttttttttttttttttttttttttttt

SEQ ID NO: 5058 - DNA, 84 bp, Artificial
  Barcode component
  misc_feature (33)..(34): n is a, c, g, or t
  misc_feature (43)..(44): n is a, c, g, or t
  misc_feature (53)..(54): n is a, c, g, or t
tttttttaagcagtggtatcaacgcagagtacnngacaagtgnngtaagccanntttttttttttttttttttttttttttttt

SEQ ID NO: 5059 - DNA, 84 bp, Artificial
  Barcode component
  misc_feature (33)..(34): n is a, c, g, or t
  misc_feature (43)..(44): n is a, c, g, or t
  misc_feature (53)..(54): n is a, c, g, or t
tttttttaagcagtggtatcaacgcagagtacnngacaagtgnntaaggtggnntttttttttttttttttttttttttttttt

SEQ ID NO: 5060 - DNA, 84 bp, Artificial
  Barcode component
  misc_feature (33)..(34): n is a, c, g, or t
  misc_feature (43)..(44): n is a, c, g, or t
  misc_feature (53)..(54): n is a, c, g, or t
tttttttaagcagtggtatcaacgcagagtacnngacaagtgnnggtaagctnntttttttttttttttttttttttttttttt

SEQ ID NO: 5061 - DNA, 84 bp, Artificial
  Barcode component
  misc_feature (33)..(34): n is a, c, g, or t
  misc_feature (43)..(44): n is a, c, g, or t
  misc_feature (53)..(54): n is a, c, g, or t
tttttttaagcagtggtatcaacgcagagtacnngacaagtgnntgtgtcganntttttttttttttttttttttttttttttt

SEQ ID NO: 5062 - DNA, 84 bp, Artificial
  Barcode component
  misc_feature (33)..(34): n is a, c, g, or t
  misc_feature (43)..(44): n is a, c, g, or t
  misc_feature (53)..(54): n is a, c, g, or t
tttttttaagcagtggtatcaacgcagagtacnngacaagtgnngagcatganntttttttttttttttttttttttttttttt

SEQ ID NO: 5063 - DNA, 84 bp, Artificial
  Barcode component
  misc_feature (33)..(34): n is a, c, g, or t
  misc_feature (43)..(44): n is a, c, g, or t
  misc_feature (53)..(54): n is a, c, g, or t
tttttttaagcagtggtatcaacgcagagtacnngacaagtgnntcgaagtcnntttttttttttttttttttttttttttttt

SEQ ID NO: 5064 - DNA, 84 bp, Artificial
  Barcode component
  misc_feature (33)..(34): n is a, c, g, or t
  misc_feature (43)..(44): n is a, c, g, or t
  misc_feature (53)..(54): n is a, c, g, or t
tttttttaagcagtggtatcaacgcagagtacnngacaagtgnnggtgaacanntttttttttttttttttttttttttttttt

SEQ ID NO: 5065 - DNA, 84 bp, Artificial
  Barcode component
  misc_feature (33)..(34): n is a, c, g, or t
  misc_feature (43)..(44): n is a, c, g, or t
  misc_feature (53)..(54): n is a, c, g, or t
tttttttaagcagtggtatcaacgcagagtacnngacaagtgnnacatgcacnntttttttttttttttttttttttttttttt

SEQ ID NO: 5066 - DNA, 84 bp, Artificial
  Barcode component
  misc_feature (33)..(34): n is a, c, g, or t
  misc_feature (43)..(44): n is a, c, g, or t
  misc_feature (53)..(54): n is a, c, g, or t
tttttttaagcagtggtatcaacgcagagtacnngacaagtgnnccaacagtnntttttttttttttttttttttttttttttt

SEQ ID NO: 5067 - DNA, 84 bp, Artificial
  Barcode component
  misc_feature (33)..(34): n is a, c, g, or t
  misc_feature (43)..(44): n is a, c, g, or t
  misc_feature (53)..(54): n is a, c, g, or t
tttttttaagcagtggtatcaacgcagagtacnngacaagtgnnagaacagcnntttttttttttttttttttttttttttttt

SEQ ID NO: 5068 - DNA, 84 bp, Artificial
  Barcode component
  misc_feature (33)..(34): n is a, c, g, or t
  misc_feature (43)..(44): n is a, c, g, or t
  misc_feature (53)..(54): n is a, c, g, or t
tttttttaagcagtggtatcaacgcagagtacnngacaagtgnngaacacgtnntttttttttttttttttttttttttttttt

SEQ ID NO: 5069 - DNA, 84 bp, Artificial
  Barcode component
  misc_feature (33)..(34): n is a, c, g, or t
  misc_feature (43)..(44): n is a, c, g, or t
  misc_feature (53)..(54): n is a, c, g, or t
tttttttaagcagtggtatcaacgcagagtacnngacaagtgnnggtcttcanntttttttttttttttttttttttttttttt

SEQ ID NO: 5070 - DNA, 84 bp, Artificial
  Barcode component
  misc_feature (33)..(34): n is a, c, g, or t
  misc_feature (43)..(44): n is a, c, g, or t
  misc_feature (53)..(54): n is a, c, g, or t
tttttttaagcagtggtatcaacgcagagtacnngacaagtgnnaggttcagnntttttttttttttttttttttttttttttt

SEQ ID NO: 5071 - DNA, 84 bp, Artificial
  Barcode component
  misc_feature (33)..(34): n is a, c, g, or t
  misc_feature (43)..(44): n is a, c, g, or t
  misc_feature (53)..(54): n is a, c, g, or t
tttttttaagcagtggtatcaacgcagagtacnngacaagtgnnctagagcanntttttttttttttttttttttttttttttt

SEQ ID NO: 5072 - DNA, 84 bp, Artificial
  Barcode component
  misc_feature (33)..(34): n is a, c, g, or t
  misc_feature (43)..(44): n is a, c, g, or t
  misc_feature (53)..(54): n is a, c, g, or t
tttttttaagcagtggtatcaacgcagagtacnngacaagtgnncttctagcnntttttttttttttttttttttttttttttt

SEQ ID NO: 5073 - DNA, 84 bp, Artificial
  Barcode component
  misc_feature (33)..(34): n is a, c, g, or t
  misc_feature (43)..(44): n is a, c, g, or t
  misc_feature (53)..(54): n is a, c, g, or t
tttttttaagcagtggtatcaacgcagagtacnngacaagtgnngagtaacgnntttttttttttttttttttttttttttttt

SEQ ID NO: 5074 - DNA, 84 bp, Artificial
  Barcode component
  misc_feature (33)..(34): n is a, c, g, or t
  misc_feature (43)..(44): n is a, c, g, or t
  misc_feature (53)..(54): n is a, c, g, or t
tttttttaagcagtggtatcaacgcagagtacnngacaagtgnnctaagaggnntttttttttttttttttttttttttttttt

SEQ ID NO: 5075 - DNA, 84 bp, Artificial
  Barcode component
  misc_feature (33)..(34): n is a, c, g, or t
  misc_feature (43)..(44): n is a, c, g, or t
  misc_feature (53)..(54): n is a, c, g, or t
tttttttaagcagtggtatcaacgcagagtacnngacaagtgnnacgtgtagnntttttttttttttttttttttttttttttt

SEQ ID NO: 5076 - DNA, 84 bp, Artificial
  Barcode component
  misc_feature (33)..(34): n is a, c, g, or t
  misc_feature (43)..(44): n is a, c, g, or t
  misc_feature (53)..(54): n is a, c, g, or t
tttttttaagcagtggtatcaacgcagagtacnngacaagtgnnactacaggnntttttttttttttttttttttttttttttt

SEQ ID NO: 5077 - DNA, 84 bp, Artificial
  Barcode component
  misc_feature (33)..(34): n is a, c, g, or t
  misc_feature (43)..(44): n is a, c, g, or t
  misc_feature (53)..(54): n is a, c, g, or t
tttttttaagcagtggtatcaacgcagagtacnngacaagtgnntacaggtcnntttttttttttttttttttttttttttttt

SEQ ID NO: 5078 - DNA, 84 bp, Artificial
  Barcode component
  misc_feature (33)..(34): n is a, c, g, or t
  misc_feature (43)..(44): n is a, c, g, or t
  misc_feature (53)..(54): n is a, c, g, or t
tttttttaagcagtggtatcaacgcagagtacnngacaagtgnnctcacatgnntttttttttttttttttttttttttttttt

SEQ ID NO: 5079 - DNA, 84 bp, Artificial
  Barcode component
  misc_feature (33)..(34): n is a, c, g, or t
  misc_feature (43)..(44): n is a, c, g, or t
  misc_feature (53)..(54): n is a, c, g, or t
tttttttaagcagtggtatcaacgcagagtacnngacaagtgnnactaggagnntttttttttttttttttttttttttttttt

SEQ ID NO: 5080 - DNA, 84 bp, Artificial
  Barcode component
  misc_feature (33)..(34): n is a, c, g, or t
  misc_feature (43)..(44): n is a, c, g, or t
  misc_feature (53)..(54): n is a, c, g, or t
tttttttaagcagtggtatcaacgcagagtacnngacaagtgnnccatagganntttttttttttttttttttttttttttttt

SEQ ID NO: 5081 - DNA, 84 bp, Artificial
  Barcode component
  misc_feature (33)..(34): n is a, c, g, or t
  misc_feature (43)..(44): n is a, c, g, or t
  misc_feature (53)..(54): n is a, c, g, or t
tttttttaagcagtggtatcaacgcagagtacnngacaagtgnnggagaatcnntttttttttttttttttttttttttttttt

SEQ ID NO: 5082 - DNA, 84 bp, Artificial
  Barcode component
  misc_feature (33)..(34): n is a, c, g, or t
  misc_feature (43)..(44): n is a, c, g, or t
  misc_feature (53)..(54): n is a, c, g, or t
tttttttaagcagtggtatcaacgcagagtacnngacaagtgnngccaagaanntttttttttttttttttttttttttttttt

SEQ ID NO: 5083 - DNA, 84 bp, Artificial
  Barcode component
  misc_feature (33)..(34): n is a, c, g, or t
  misc_feature (43)..(44): n is a, c, g, or t
  misc_feature (53)..(54): n is a, c, g, or t
tttttttaagcagtggtatcaacgcagagtacnngacaagtgnnaaggcaagnntttttttttttttttttttttttttttttt

SEQ ID NO: 5084 - DNA, 84 bp, Artificial
  Barcode component
  misc_feature (33)..(34): n is a, c, g, or t
  misc_feature (43)..(44): n is a, c, g, or t
  misc_feature (53)..(54): n is a, c, g, or t
tttttttaagcagtggtatcaacgcagagtacnngacaagtgnnaatgtcgcnntttttttttttttttttttttttttttttt

SEQ ID NO: 5085 - DNA, 84 bp, Artificial
  Barcode component
  misc_feature (33)..(34): n is a, c, g, or t
  misc_feature (43)..(44): n is a, c, g, or t
  misc_feature (53)..(54): n is a, c, g, or t
tttttttaagcagtggtatcaacgcagagtacnngacaagtgnnatggaaccnntttttttttttttttttttttttttttttt

SEQ ID NO: 5086 - DNA, 84 bp, Artificial
  Barcode component
  misc_feature (33)..(34): n is a, c, g, or t
  misc_feature (43)..(44): n is a, c, g, or t
  misc_feature (53)..(54): n is a, c, g, or t
tttttttaagcagtggtatcaacgcagagtacnngacaagtgnnagaggcatnntttttttttttttttttttttttttttttt

SEQ ID NO: 5087 - DNA, 84 bp, Artificial
  Barcode component
  misc_feature (33)..(34): n is a, c, g, or t
  misc_feature (43)..(44): n is a, c, g, or t
  misc_feature (53)..(54): n is a, c, g, or t
tttttttaagcagtggtatcaacgcagagtacnngacaagtgnntgcatagcnntttttttttttttttttttttttttttttt

SEQ ID NO: 5088 - DNA, 84 bp, Artificial
  Barcode component
  misc_feature (33)..(34): n is a, c, g, or t
  misc_feature (43)..(44): n is a, c, g, or t
  misc_feature (53)..(54): n is a, c, g, or t
tttttttaagcagtggtatcaacgcagagtacnngacaagtgnnctaacgganntttttttttttttttttttttttttttttt

SEQ ID NO: 5089 - DNA, 84 bp, Artificial
  Barcode component
  misc_feature (33)..(34): n is a, c, g, or t
  misc_feature (43)..(44): n is a, c, g, or t
  misc_feature (53)..(54): n is a, c, g, or t
tttttttaagcagtggtatcaacgcagagtacnngacaagtgnntatcgaggnntttttttttttttttttttttttttttttt

SEQ ID NO: 5090 - DNA, 84 bp, Artificial
  Barcode component
  misc_feature (33)..(34): n is a, c, g, or t
  misc_feature (43)..(44): n is a, c, g, or t
  misc_feature (53)..(54): n is a, c, g, or t
tttttttaagcagtggtatcaacgcagagtacnngacaagtgnncatagcctnntttttttttttttttttttttttttttttt

SEQ ID NO: 5091 - DNA, 84 bp, Artificial
  Barcode component
  misc_feature (33)..(34): n is a, c, g, or t
  misc_feature (43)..(44): n is a, c, g, or t
  misc_feature (53)..(54): n is a, c, g, or t
tttttttaagcagtggtatcaacgcagagtacnngacaagtgnnatcgagacnntttttttttttttttttttttttttttttt

SEQ ID NO: 5092 - DNA, 84 bp, Artificial
  Barcode component
  misc_feature (33)..(34): n is a, c, g, or t
  misc_feature (43)..(44): n is a, c, g, or t
  misc_feature (53)..(54): n is a, c, g, or t
tttttttaagcagtggtatcaacgcagagtacnngacaagtgnnggaagagtnntttttttttttttttttttttttttttttt

SEQ ID NO: 5093 - DNA, 84 bp, Artificial
  Barcode component
  misc_feature (33)..(34): n is a, c, g, or t
  misc_feature (43)..(44): n is a, c, g, or t
  misc_feature (53)..(54): n is a, c, g, or t
tttttttaagcagtggtatcaacgcagagtacnngacaagtgnnccaagtagnntttttttttttttttttttttttttttttt

SEQ ID NO: 5094 - DNA, 84 bp, Artificial
  Barcode component
  misc_feature (33)..(34): n is a, c, g, or t
  misc_feature (43)..(44): n is a, c, g, or t
  misc_feature (53)..(54): n is a, c, g, or t
tttttttaagcagtggtatcaacgcagagtacnngacaagtgnnctgaacagnntttttttttttttttttttttttttttttt

SEQ ID NO: 5095 - DNA, 84 bp, Artificial
  Barcode component
  misc_feature (33)..(34): n is a, c, g, or t
  misc_feature (43)..(44): n is a, c, g, or t
  misc_feature (53)..(54): n is a, c, g, or t
tttttttaagcagtggtatcaacgcagagtacnngacaagtgnngtaggttcnntttttttttttttttttttttttttttttt

SEQ ID NO: 5096 - DNA, 84 bp, Artificial
  Barcode component
  misc_feature (33)..(34): n is a, c, g, or t
  misc_feature (43)..(44): n is a, c, g, or t
  misc_feature (53)..(54): n is a, c, g, or t
tttttttaagcagtggtatcaacgcagagtacnngacaagtgnngtatggacnntttttttttttttttttttttttttttttt

SEQ ID NO: 5097 - DNA, 84 bp, Artificial
  Barcode component
  misc_feature (33)..(34): n is a, c, g, or t
  misc_feature (43)..(44): n is a, c, g, or t
  misc_feature (53)..(54): n is a, c, g, or t
tttttttaagcagtggtatcaacgcagagtacnngacaagtgnntcgcaacanntttttttttttttttttttttttttttttt

SEQ ID NO: 5098 - DNA, 84 bp, Artificial
  Barcode component
  misc_feature (33)..(34): n is a, c, g, or t
  misc_feature (43)..(44): n is a, c, g, or t
  misc_feature (53)..(54): n is a, c, g, or t
tttttttaagcagtggtatcaacgcagagtacnngacaagtgnnccgctaatnntttttttttttttttttttttttttttttt

SEQ ID NO: 5099 - DNA, 84 bp, Artificial
  Barcode component
  misc_feature (33)..(34): n is a, c, g, or t
  misc_feature (43)..(44): n is a, c, g, or t
  misc_feature (53)..(54): n is a, c, g, or t
tttttttaagcagtggtatcaacgcagagtacnngacaagtgnngattcgcanntttttttttttttttttttttttttttttt

SEQ ID NO: 5100 - DNA, 84 bp, Artificial
  Barcode component
  misc_feature (33)..(34): n is a, c, g, or t
  misc_feature (43)..(44): n is a, c, g, or t
  misc_feature (53)..(54): n is a, c, g, or t
tttttttaagcagtggtatcaacgcagagtacnngacaagtgnncgatggaanntttttttttttttttttttttttttttttt

SEQ ID NO: 5101 - DNA, 84 bp, Artificial
  Barcode component
  misc_feature (33)..(34): n is a, c, g, or t
  misc_feature (43)..(44): n is a, c, g, or t
  misc_feature (53)..(54): n is a, c, g, or t
tttttttaagcagtggtatcaacgcagagtacnngacaagtgnnagcaagganntttttttttttttttttttttttttttttt

SEQ ID NO: 5102 - DNA, 84 bp, Artificial
  Barcode component
  misc_feature (33)..(34): n is a, c, g, or t
  misc_feature (43)..(44): n is a, c, g, or t
  misc_feature (53)..(54): n is a, c, g, or t
tttttttaagcagtggtatcaacgcagagtacnngacaagtgnncgtagcaanntttttttttttttttttttttttttttttt

SEQ ID NO: 5103 - DNA, 84 bp, Artificial
  Barcode component
  misc_feature (33)..(34): n is a, c, g, or t
  misc_feature (43)..(44): n is a, c, g, or t
  misc_feature (53)..(54): n is a, c, g, or t
tttttttaagcagtggtatcaacgcagagtacnngacaagtgnntggcagtanntttttttttttttttttttttttttttttt

SEQ ID NO: 5104 - DNA, 84 bp, Artificial
  Barcode component
  misc_feature (33)..(34): n is a, c, g, or t
  misc_feature (43)..(44): n is a, c, g, or t
  misc_feature (53)..(54): n is a, c, g, or t
tttttttaagcagtggtatcaacgcagagtacnngacaagtgnncggtagttnntttttttttttttttttttttttttttttt

SEQ ID NO: 5105 - DNA, 84 bp, Artificial
  Barcode component
  misc_feature (33)..(34): n is a, c, g, or t
  misc_feature (43)..(44): n is a, c, g, or t
  misc_feature (53)..(54): n is a, c, g, or t
tttttttaagcagtggtatcaacgcagagtacnngacaagtgnntgacttcgnntttttttttttttttttttttttttttttt

SEQ ID NO: 5106 - DNA, 84 bp, Artificial
  Barcode component
  misc_feature (33)..(34): n is a, c, g, or t
  misc_feature (43)..(44): n is a, c, g, or t
  misc_feature (53)..(54): n is a, c, g, or t
tttttttaagcagtggtatcaacgcagagtacnngacaagtgnngagtgcaanntttttttttttttttttttttttttttttt

SEQ ID NO: 5107 - DNA, 84 bp, Artificial
  Barcode component
  misc_feature (33)..(34): n is a, c, g, or t
  misc_feature (43)..(44): n is a, c, g, or t
  misc_feature (53)..(54): n is a, c, g, or t
tttttttaagcagtggtatcaacgcagagtacnngacaagtgnnacggtaacnntttttttttttttttttttttttttttttt

SEQ ID NO: 5108 - DNA, 84 bp, Artificial
  Barcode component
  misc_feature (33)..(34): n is a, c, g, or t
  misc_feature (43)..(44): n is a, c, g, or t
  misc_feature (53)..(54): n is a, c, g, or t
tttttttaagcagtggtatcaacgcagagtacnngacaagtgnnaagtggtgnntttttttttttttttttttttttttttttt

SEQ ID NO: 5109 - DNA, 84 bp, Artificial
  Barcode component
  misc_feature (33)..(34): n is a, c, g, or t
  misc_feature (43)..(44): n is a, c, g, or t
  misc_feature (53)..(54): n is a, c, g, or t
tttttttaagcagtggtatcaacgcagagtacnngacaagtgnnggagacaanntttttttttttttttttttttttttttttt

SEQ ID NO: 5110 - DNA, 84 bp, Artificial
  Barcode component
  misc_feature (33)..(34): n is a, c, g, or t
  misc_feature (43)..(44): n is a, c, g, or t
  misc_feature (53)..(54): n is a, c, g, or t
tttttttaagcagtggtatcaacgcagagtacnngacaagtgnntcaaggacnntttttttttttttttttttttttttttttt

SEQ ID NO: 5111 - DNA, 84 bp, Artificial
  Barcode component
  misc_feature (33)..(34): n is a, c, g, or t
  misc_feature (43)..(44): n is a, c, g, or t
  misc_feature (53)..(54): n is a, c, g, or t
tttttttaagcagtggtatcaacgcagagtacnngacaagtgnnaagagagcnntttttttttttttttttttttttttttttt

SEQ ID NO: 5112 - DNA, 84 bp, Artificial
  Barcode component
  misc_feature (33)..(34): n is a, c, g, or t
  misc_feature (43)..(44): n is a, c, g, or t
  misc_feature (53)..(54): n is a, c, g, or t
tttttttaagcagtggtatcaacgcagagtacnngacaagtgnncgagagatnntttttttttttttttttttttttttttttt

SEQ ID NO: 5113 - DNA, 84 bp, Artificial
  Barcode component
  misc_feature (33)..(34): n is a, c, g, or t
  misc_feature (43)..(44): n is a, c, g, or t
  misc_feature (53)..(54): n is a, c, g, or t
tttttttaagcagtggtatcaacgcagagtacnngacaagtgnnacagatggnntttttttttttttttttttttttttttttt

SEQ ID NO: 5114 - DNA, 84 bp, Artificial
  Barcode component
  misc_feature (33)..(34): n is a, c, g, or t
  misc_feature (43)..(44): n is a, c, g, or t
  misc_feature (53)..(54): n is a, c, g, or t
tttttttaagcagtggtatcaacgcagagtacnngacaagtgnnaggagtcanntttttttttttttttttttttttttttttt

SEQ ID NO: 5115 - DNA, 84 bp, Artificial
  Barcode component
  misc_feature (33)..(34): n is a, c, g, or t
  misc_feature (43)..(44): n is a, c, g, or t
  misc_feature (53)..(54): n is a, c, g, or t
tttttttaagcagtggtatcaacgcagagtacnngacaagtgnncgtgttacnntttttttttttttttttttttttttttttt

SEQ ID NO: 5116 - DNA, 84 bp, Artificial
  Barcode component
  misc_feature (33)..(34): n is a, c, g, or t
  misc_feature (43)..(44): n is a, c, g, or t
  misc_feature (53)..(54): n is a, c, g, or t
tttttttaagcagtggtatcaacgcagagtacnngacaagtgnntagtgtgcnntttttttttttttttttttttttttttttt

SEQ ID NO: 5117 - DNA, 84 bp, Artificial
  Barcode component
  misc_feature (33)..(34): n is a, c, g, or t
  misc_feature (43)..(44): n is a, c, g, or t
  misc_feature (53)..(54): n is a, c, g, or t
tttttttaagcagtggtatcaacgcagagtacnngacaagtgnnctcatgacnntttttttttttttttttttttttttttttt

SEQ ID NO: 5118 - DNA, 84 bp, Artificial
  Barcode component
  misc_feature (33)..(34): n is a, c, g, or t
  misc_feature (43)..(44): n is a, c, g, or t
  misc_feature (53)..(54): n is a, c, g, or t
tttttttaagcagtggtatcaacgcagagtacnngacaagtgnngtatccagnntttttttttttttttttttttttttttttt

SEQ ID NO: 5119 - DNA, 84 bp, Artificial
  Barcode component
  misc_feature (33)..(34): n is a, c, g, or t
  misc_feature (43)..(44): n is a, c, g, or t
  misc_feature (53)..(54): n is a, c, g, or t
tttttttaagcagtggtatcaacgcagagtacnngacaagtgnnacgcctatnntttttttttttttttttttttttttttttt

SEQ ID NO: 5120 - DNA, 84 bp, Artificial
  Barcode component
  misc_feature (33)..(34): n is a, c, g, or t
  misc_feature (43)..(44): n is a, c, g, or t
  misc_feature (53)..(54): n is a, c, g, or t
tttttttaagcagtggtatcaacgcagagtacnngacaagtgnnaacgacctnntttttttttttttttttttttttttttttt

SEQ ID NO: 5121 - DNA, 84 bp, Artificial
  Barcode component
  misc_feature (33)..(34): n is a, c, g, or t
  misc_feature (43)..(44): n is a, c, g, or t
  misc_feature (53)..(54): n is a, c, g, or t
tttttttaagcagtggtatcaacgcagagtacnngacaagtgnnatcaggctnntttttttttttttttttttttttttttttt

SEQ ID NO: 5122 - DNA, 84 bp, Artificial
  Barcode component
  misc_feature (33)..(34): n is a, c, g, or t
  misc_feature (43)..(44): n is a, c, g, or t
  misc_feature (53)..(54): n is a, c, g, or t
tttttttaagcagtggtatcaacgcagagtacnngacaagtgnncaagttcgnntttttttttttttttttttttttttttttt

SEQ ID NO: 5123 - DNA, 84 bp, Artificial
  Barcode component
  misc_feature (33)..(34): n is a, c, g, or t
  misc_feature (43)..(44): n is a, c, g, or t
  misc_feature (53)..(54): n is a, c, g, or t
tttttttaagcagtggtatcaacgcagagtacnngacaagtgnntagccaganntttttttttttttttttttttttttttttt

SEQ ID NO: 5124 - DNA, 84 bp, Artificial
  Barcode component
  misc_feature (33)..(34): n is a, c, g, or t
  misc_feature (43)..(44): n is a, c, g, or t
  misc_feature (53)..(54): n is a, c, g, or t
tttttttaagcagtggtatcaacgcagagtacnngacaagtgnncaatcacgnntttttttttttttttttttttttttttttt

SEQ ID NO: 5125 - DNA, 84 bp, Artificial
  Barcode component
  misc_feature (33)..(34): n is a, c, g, or t
  misc_feature (43)..(44): n is a, c, g, or t
  misc_feature (53)..(54): n is a, c, g, or t
tttttttaagcagtggtatcaacgcagagtacnngacaagtgnngcaacaagnntttttttttttttttttttttttttttttt

SEQ ID NO: 5126 - DNA, 84 bp, Artificial
  Barcode component
  misc_feature (33)..(34): n is a, c, g, or t
  misc_feature (43)..(44): n is a, c, g, or t
  misc_feature (53)..(54): n is a, c, g, or t
tttttttaagcagtggtatcaacgcagagtacnngacaagtgnncacgacaanntttttttttttttttttttttttttttttt

SEQ ID NO: 5127 - DNA, 84 bp, Artificial
  Barcode component
  misc_feature (33)..(34): n is a, c, g, or t
  misc_feature (43)..(44): n is a, c, g, or t
  misc_feature (53)..(54): n is a, c, g, or t
tttttttaagcagtggtatcaacgcagagtacnngacaagtgnntacggaganntttttttttttttttttttttttttttttt

SEQ ID NO: 5128 - DNA, 84 bp, Artificial
  Barcode component
  misc_feature (33)..(34): n is a, c, g, or t
  misc_feature (43)..(44): n is a, c, g, or t
  misc_feature (53)..(54): n is a, c, g, or t
tttttttaagcagtggtatcaacgcagagtacnngacaagtgnncgacaaganntttttttttttttttttttttttttttttt

SEQ ID NO: 5129 - DNA, 84 bp, Artificial
  Barcode component
  misc_feature (33)..(34): n is a, c, g, or t
  misc_feature (43)..(44): n is a, c, g, or t
  misc_feature (53)..(54): n is a, c, g, or t
tttttttaagcagtggtatcaacgcagagtacnngacaagtgnncgaagtganntttttttttttttttttttttttttttttt

SEQ ID NO: 5130 - DNA, 84 bp, Artificial
  Barcode component
  misc_feature (33)..(34): n is a, c, g, or t
  misc_feature (43)..(44): n is a, c, g, or t
  misc_feature (53)..(54): n is a, c, g, or t
tttttttaagcagtggtatcaacgcagagtacnngacaagtgnnagctggtanntttttttttttttttttttttttttttttt

SEQ ID NO: 5131 - DNA, 84 bp, Artificial
  Barcode component
  misc_feature (33)..(34): n is a, c, g, or t
  misc_feature (43)..(44): n is a, c, g, or t
  misc_feature (53)..(54): n is a, c, g, or t
tttttttaagcagtggtatcaacgcagagtacnngacaagtgnnaactaggcnntttttttttttttttttttttttttttttt

SEQ ID NO: 5132 - DNA, 84 bp, Artificial
  Barcode component
  misc_feature (33)..(34): n is a, c, g, or t
  misc_feature (43)..(44): n is a, c, g, or t
  misc_feature (53)..(54): n is a, c, g, or t
tttttttaagcagtggtatcaacgcagagtacnngacaagtgnncagcaagtnntttttttttttttttttttttttttttttt

SEQ ID NO: 5133 - DNA, 84 bp, Artificial
  Barcode component
  misc_feature (33)..(34): n is a, c, g, or t
  misc_feature (43)..(44): n is a, c, g, or t
  misc_feature (53)..(54): n is a, c, g, or t
tttttttaagcagtggtatcaacgcagagtacnngacaagtgnnacgaggtanntttttttttttttttttttttttttttttt

SEQ ID NO: 5134 - DNA, 84 bp, Artificial
  Barcode component
  misc_feature (33)..(34): n is a, c, g, or t
  misc_feature (43)..(44): n is a, c, g, or t
  misc_feature (53)..(54): n is a, c, g, or t
tttttttaagcagtggtatcaacgcagagtacnngacaagtgnncatcttccnntttttttttttttttttttttttttttttt

SEQ ID NO: 5135 - DNA, 84 bp, Artificial
  Barcode component
  misc_feature (33)..(34): n is a, c, g, or t
  misc_feature (43)..(44): n is a, c, g, or t
  misc_feature (53)..(54): n is a, c, g, or t
tttttttaagcagtggtatcaacgcagagtacnngacaagtgnncctgaatcnntttttttttttttttttttttttttttttt

SEQ ID NO: 5136 - DNA, 84 bp, Artificial
  Barcode component
  misc_feature (33)..(34): n is a, c, g, or t
  misc_feature (43)..(44): n is a, c, g, or t
  misc_feature (53)..(54): n is a, c, g, or t
tttttttaagcagtggtatcaacgcagagtacnngacaagtgnntgcagactnntttttttttttttttttttttttttttttt

SEQ ID NO: 5137 - DNA, 84 bp, Artificial
  Barcode component
  misc_feature (33)..(34): n is a, c, g, or t
  misc_feature (43)..(44): n is a, c, g, or t
  misc_feature (53)..(54): n is a, c, g, or t
tttttttaagcagtggtatcaacgcagagtacnngacaagtgnnagatgtggnntttttttttttttttttttttttttttttt

SEQ ID NO: 5138 - DNA, 84 bp, Artificial
  Barcode component
  misc_feature (33)..(34): n is a, c, g, or t
  misc_feature (43)..(44): n is a, c, g, or t
  misc_feature (53)..(54): n is a, c, g, or t
tttttttaagcagtggtatcaacgcagagtacnngacaagtgnnagttcgacnntttttttttttttttttttttttttttttt

SEQ ID NO: 5139 - DNA, 84 bp, Artificial
  Barcode component
  misc_feature (33)..(34): n is a, c, g, or t
  misc_feature (43)..(44): n is a, c, g, or t
  misc_feature (53)..(54): n is a, c, g, or t
tttttttaagcagtggtatcaacgcagagtacnngacaagtgnnacaacctcnntttttttttttttttttttttttttttttt

SEQ ID NO: 5140 - DNA, 84 bp, Artificial
  Barcode component
  misc_feature (33)..(34): n is a, c, g, or t
  misc_feature (43)..(44): n is a, c, g, or t
  misc_feature (53)..(54): n is a, c, g, or t
tttttttaagcagtggtatcaacgcagagtacnngacaagtgnncatggtagnntttttttttttttttttttttttttttttt

SEQ ID NO: 5141 - DNA, 84 bp, Artificial
  Barcode component
  misc_feature (33)..(34): n is a, c, g, or t
  misc_feature (43)..(44): n is a, c, g, or t
  misc_feature (53)..(54): n is a, c, g, or t
tttttttaagcagtggtatcaacgcagagtacnngacaagtgnncgtatctcnntttttttttttttttttttttttttttttt

SEQ ID NO: 5142 - DNA, 84 bp, Artificial
  Barcode component
  misc_feature (33)..(34): n is a, c, g, or t
  misc_feature (43)..(44): n is a, c, g, or t
  misc_feature (53)..(54): n is a, c, g, or t
tttttttaagcagtggtatcaacgcagagtacnngacaagtgnncctagttcnntttttttttttttttttttttttttttttt

SEQ ID NO: 5143 - DNA, 84 bp, Artificial
  Barcode component
  misc_feature (33)..(34): n is a, c, g, or t
  misc_feature (43)..(44): n is a, c, g, or t
  misc_feature (53)..(54): n is a, c, g, or t
tttttttaagcagtggtatcaacgcagagtacnngacaagtgnncaagagtcnntttttttttttttttttttttttttttttt

SEQ ID NO: 5144 - DNA, 84 bp, Artificial
  Barcode component
  misc_feature (33)..(34): n is a, c, g, or t
  misc_feature (43)..(44): n is a, c, g, or t
  misc_feature (53)..(54): n is a, c, g, or t
tttttttaagcagtggtatcaacgcagagtacnntaggaagcnnaatcggcanntttttttttttttttttttttttttttttt

SEQ ID NO: 5145 - DNA, 84 bp, Artificial
  Barcode component
  misc_feature (33)..(34): n is a, c, g, or t
  misc_feature (43)..(44): n is a, c, g, or t
  misc_feature (53)..(54): n is a, c, g, or t
tttttttaagcagtggtatcaacgcagagtacnntaggaagcnntacggcatnntttttttttttttttttttttttttttttt

SEQ ID NO: 5146 - DNA, 84 bp, Artificial
  Barcode component
  misc_feature (33)..(34): n is a, c, g, or t
  misc_feature (43)..(44): n is a, c, g, or t
  misc_feature (53)..(54): n is a, c, g, or t
tttttttaagcagtggtatcaacgcagagtacnntaggaagcnnttggatcgnntttttttttttttttttttttttttttttt

SEQ ID NO: 5147 - DNA, 84 bp, Artificial
  Barcode component
  misc_feature (33)..(34): n is a, c, g, or t
  misc_feature (43)..(44): n is a, c, g, or t
  misc_feature (53)..(54): n is a, c, g, or t
tttttttaagcagtggtatcaacgcagagtacnntaggaagcnntggaacganntttttttttttttttttttttttttttttt

SEQ ID NO: 5148 - DNA, 84 bp, Artificial
  Barcode component
  misc_feature (33)..(34): n is a, c, g, or t
  misc_feature (43)..(44): n is a, c, g, or t
  misc_feature (53)..(54): n is a, c, g, or t
tttttttaagcagtggtatcaacgcagagtacnntaggaagcnnggcaatcanntttttttttttttttttttttttttttttt

SEQ ID NO: 5149 - DNA, 84 bp, Artificial
  Barcode component
  misc_feature (33)..(34): n is a, c, g, or t
  misc_feature (43)..(44): n is a, c, g, or t
  misc_feature (53)..(54): n is a, c, g, or t
tttttttaagcagtggtatcaacgcagagtacnntaggaagcnngaatccganntttttttttttttttttttttttttttttt

SEQ ID NO: 5150 - DNA, 84 bp, Artificial
  Barcode component
  misc_feature (33)..(34): n is a, c, g, or t
  misc_feature (43)..(44): n is a, c, g, or t
  misc_feature (53)..(54): n is a, c, g, or t
tttttttaagcagtggtatcaacgcagagtacnntaggaagcnnttacggtgnntttttttttttttttttttttttttttttt

SEQ ID NO: 5151 - DNA, 84 bp, Artificial
  Barcode component
  misc_feature (33)..(34): n is a, c, g, or t
  misc_feature (43)..(44): n is a, c, g, or t
  misc_feature (53)..(54): n is a, c, g, or t
tttttttaagcagtggtatcaacgcagagtacnntaggaagcnncatatcggnntttttttttttttttttttttttttttttt

SEQ ID NO: 5152 - DNA, 84 bp, Artificial
  Barcode component
  misc_feature (33)..(34): n is a, c, g, or t
  misc_feature (43)..(44): n is a, c, g, or t
  misc_feature (53)..(54): n is a, c, g, or t
tttttttaagcagtggtatcaacgcagagtacnntaggaagcnncttcggtanntttttttttttttttttttttttttttttt

SEQ ID NO: 5153 - DNA, 84 bp, Artificial
  Barcode component
  misc_feature (33)..(34): n is a, c, g, or t
  misc_feature (43)..(44): n is a, c, g, or t
  misc_feature (53)..(54): n is a, c, g, or t
tttttttaagcagtggtatcaacgcagagtacnntaggaagcnntcctaacgnntttttttttttttttttttttttttttttt

SEQ ID NO: 5154 - DNA, 84 bp, Artificial
  Barcode component
  misc_feature (33)..(34): n is a, c, g, or t
  misc_feature (43)..(44): n is a, c, g, or t
  misc_feature (53)..(54): n is a, c, g, or t
tttttttaagcagtggtatcaacgcagagtacnntaggaagcnngtaagccanntttttttttttttttttttttttttttttt

SEQ ID NO: 5155 - DNA, 84 bp, Artificial
  Barcode component
  misc_feature (33)..(34): n is a, c, g, or t
  misc_feature (43)..(44): n is a, c, g, or t
  misc_feature (53)..(54): n is a, c, g, or t
tttttttaagcagtggtatcaacgcagagtacnntaggaagcnntaaggtggnntttttttttttttttttttttttttttttt

SEQ ID NO: 5156 - DNA, 84 bp, Artificial
  Barcode component
  misc_feature (33)..(34): n is a, c, g, or t
  misc_feature (43)..(44): n is a, c, g, or t
  misc_feature (53)..(54): n is a, c, g, or t
tttttttaagcagtggtatcaacgcagagtacnntaggaagcnnggtaagctnntttttttttttttttttttttttttttttt

SEQ ID NO: 5157 - DNA, 84 bp, Artificial
  Barcode component
  misc_feature (33)..(34): n is a, c, g, or t
  misc_feature (43)..(44): n is a, c, g, or t
  misc_feature (53)..(54): n is a, c, g, or t
tttttttaagcagtggtatcaacgcagagtacnntaggaagcnntgtgtcganntttttttttttttttttttttttttttttt

SEQ ID NO: 5158 - DNA, 84 bp, Artificial
  Barcode component
  misc_feature (33)..(34): n is a, c, g, or t
  misc_feature (43)..(44): n is a, c, g, or t
  misc_feature (53)..(54): n is a, c, g, or t
tttttttaagcagtggtatcaacgcagagtacnntaggaagcnngagcatganntttttttttttttttttttttttttttttt

SEQ ID NO: 5159 - DNA, 84 bp, Artificial
  Barcode component
  misc_feature (33)..(34): n is a, c, g, or t
  misc_feature (43)..(44): n is a, c, g, or t
  misc_feature (53)..(54): n is a, c, g, or t
tttttttaagcagtggtatcaacgcagagtacnntaggaagcnntcgaagtcnntttttttttttttttttttttttttttttt

SEQ ID NO: 5160 - DNA, 84 bp, Artificial
  Barcode component
  misc_feature (33)..(34): n is a, c, g, or t
  misc_feature (43)..(44): n is a, c, g, or t
  misc_feature (53)..(54): n is a, c, g, or t
tttttttaagcagtggtatcaacgcagagtacnntaggaagcnnggtgaacanntttttttttttttttttttttttttttttt

SEQ ID NO: 5161 - DNA, 84 bp, Artificial
  Barcode component
  misc_feature (33)..(34): n is a, c, g, or t
  misc_feature (43)..(44): n is a, c, g, or t
  misc_feature (53)..(54): n is a, c, g, or t
tttttttaagcagtggtatcaacgcagagtacnntaggaagcnnacatgcacnntttttttttttttttttttttttttttttt

SEQ ID NO: 5162 - DNA, 84 bp, Artificial
  Barcode component
  misc_feature (33)..(34): n is a, c, g, or t
  misc_feature (43)..(44): n is a, c, g, or t
  misc_feature (53)..(54): n is a, c, g, or t
tttttttaagcagtggtatcaacgcagagtacnntaggaagcnnccaacagtnntttttttttttttttttttttttttttttt

SEQ ID NO: 5163 - DNA, 84 bp, Artificial
  Barcode component
  misc_feature (33)..(34): n is a, c, g, or t
  misc_feature (43)..(44): n is a, c, g, or t
  misc_feature (53)..(54): n is a, c, g, or t
tttttttaagcagtggtatcaacgcagagtacnntaggaagcnnagaacagcnntttttttttttttttttttttttttttttt

SEQ ID NO: 5164 - DNA, 84 bp, Artificial
  Barcode component
  misc_feature (33)..(34): n is a, c, g, or t
  misc_feature (43)..(44): n is a, c, g, or t
  misc_feature (53)..(54): n is a, c, g, or t
tttttttaagcagtggtatcaacgcagagtacnntaggaagcnngaacacgtnntttttttttttttttttttttttttttttt

SEQ ID NO: 5165 - DNA, 84 bp, Artificial
  Barcode component
  misc_feature (33)..(34): n is a, c, g, or t
  misc_feature (43)..(44): n is a, c, g, or t
  misc_feature (53)..(54): n is a, c, g, or t
tttttttaagcagtggtatcaacgcagagtacnntaggaagcnnggtcttcanntttttttttttttttttttttttttttttt

SEQ ID NO: 5166 - DNA, 84 bp, Artificial
  Barcode component
  misc_feature (33)..(34): n is a, c, g, or t
  misc_feature (43)..(44): n is a, c, g, or t
  misc_feature (53)..(54): n is a, c, g, or t
tttttttaagcagtggtatcaacgcagagtacnntaggaagcnnaggttcagnntttttttttttttttttttttttttttttt

SEQ ID NO: 5167 - DNA, 84 bp, Artificial
  Barcode component
  misc_feature (33)..(34): n is a, c, g, or t
  misc_feature (43)..(44): n is a, c, g, or t
  misc_feature (53)..(54): n is a, c, g, or t
tttttttaagcagtggtatcaacgcagagtacnntaggaagcnnctagagcanntttttttttttttttttttttttttttttt

SEQ ID NO: 5168 - DNA, 84 bp, Artificial
  Barcode component
  misc_feature (33)..(34): n is a, c, g, or t
  misc_feature (43)..(44): n is a, c, g, or t
  misc_feature (53)..(54): n is a, c, g, or t
tttttttaagcagtggtatcaacgcagagtacnntaggaagcnncttctagcnntttttttttttttttttttttttttttttt

SEQ ID NO: 5169 - DNA, 84 bp, Artificial
  Barcode component
  misc_feature (33)..(34): n is a, c, g, or t
  misc_feature (43)..(44): n is a, c, g, or t
  misc_feature (53)..(54): n is a, c, g, or t
tttttttaagcagtggtatcaacgcagagtacnntaggaagcnngagtaacgnntttttttttttttttttttttttttttttt

SEQ ID NO: 5170 - DNA, 84 bp, Artificial
  Barcode component
  misc_feature (33)..(34): n is a, c, g, or t
  misc_feature (43)..(44): n is a, c, g, or t
  misc_feature (53)..(54): n is a, c, g, or t
tttttttaagcagtggtatcaacgcagagtacnntaggaagcnnctaagaggnntttttttttttttttttttttttttttttt

SEQ ID NO: 5171 - DNA, 84 bp, Artificial
  Barcode component
  misc_feature (33)..(34): n is a, c, g, or t
  misc_feature (43)..(44): n is a, c, g, or t
  misc_feature (53)..(54): n is a, c, g, or t
tttttttaagcagtggtatcaacgcagagtacnntaggaagcnnacgtgtagnntttttttttttttttttttttttttttttt

SEQ ID NO: 5172 - DNA, 84 bp, Artificial
  Barcode component
  misc_feature (33)..(34): n is a, c, g, or t
  misc_feature (43)..(44): n is a, c, g, or t
  misc_feature (53)..(54): n is a, c, g, or t
tttttttaagcagtggtatcaacgcagagtacnntaggaagcnnactacaggnntttttttttttttttttttttttttttttt

SEQ ID NO: 5173 - DNA, 84 bp, Artificial
  Barcode component
  misc_feature (33)..(34): n is a, c, g, or t
  misc_feature (43)..(44): n is a, c, g, or t
  misc_feature (53)..(54): n is a, c, g, or t
tttttttaagcagtggtatcaacgcagagtacnntaggaagcnntacaggtcnntttttttttttttttttttttttttttttt

SEQ ID NO: 5174 - DNA, 84 bp, Artificial
  Barcode component
  misc_feature (33)..(34): n is a, c, g, or t
  misc_feature (43)..(44): n is a, c, g, or t
  misc_feature (53)..(54): n is a, c, g, or t
tttttttaagcagtggtatcaacgcagagtacnntaggaagcnnctcacatgnntttttttttttttttttttttttttttttt

SEQ ID NO: 5175 - DNA, 84 bp, Artificial
  Barcode component
  misc_feature (33)..(34): n is a, c, g, or t
  misc_feature (43)..(44): n is a, c, g, or t
  misc_feature (53)..(54): n is a, c, g, or t
tttttttaagcagtggtatcaacgcagagtacnntaggaagcnnactaggagnntttttttttttttttttttttttttttttt

SEQ ID NO: 5176 - DNA, 84 bp, Artificial
  Barcode component
  misc_feature (33)..(34): n is a, c, g, or t
  misc_feature (43)..(44): n is a, c, g, or t
  misc_feature (53)..(54): n is a, c, g, or t
tttttttaagcagtggtatcaacgcagagtacnntaggaagcnnccatagganntttttttttttttttttttttttttttttt

SEQ ID NO: 5177 - DNA, 84 bp, Artificial
  Barcode component
  misc_feature (33)..(34): n is a, c, g, or t
  misc_feature (43)..(44): n is a, c, g, or t
  misc_feature (53)..(54): n is a, c, g, or t
tttttttaagcagtggtatcaacgcagagtacnntaggaagcnnggagaatcnntttttttttttttttttttttttttttttt

SEQ ID NO: 5178 - DNA, 84 bp, Artificial
  Barcode component
  misc_feature (33)..(34): n is a, c, g, or t
  misc_feature (43)..(44): n is a, c, g, or t
  misc_feature (53)..(54): n is a, c, g, or t
tttttttaagcagtggtatcaacgcagagtacnntaggaagcnngccaagaanntttttttttttttttttttttttttttttt

SEQ ID NO: 5179 - DNA, 84 bp, Artificial
  Barcode component
  misc_feature (33)..(34): n is a, c, g, or t
  misc_feature (43)..(44): n is a, c, g, or t
  misc_feature (53)..(54): n is a, c, g, or t
tttttttaagcagtggtatcaacgcagagtacnntaggaagcnnaaggcaagnntttttttttttttttttttttttttttttt

SEQ ID NO: 5180 - DNA, 84 bp, Artificial
  Barcode component
  misc_feature (33)..(34): n is a, c, g, or t
  misc_feature (43)..(44): n is a, c, g, or t
  misc_feature (53)..(54): n is a, c, g, or t
tttttttaagcagtggtatcaacgcagagtacnntaggaagcnnaatgtcgcnntttttttttttttttttttttttttttttt

SEQ ID NO: 5181 - DNA, 84 bp, Artificial
  Barcode component
  misc_feature (33)..(34): n is a, c, g, or t
  misc_feature (43)..(44): n is a, c, g, or t
  misc_feature (53)..(54): n is a, c, g, or t
tttttttaagcagtggtatcaacgcagagtacnntaggaagcnnatggaaccnntttttttttttttttttttttttttttttt

SEQ ID NO: 5182 - DNA, 84 bp, Artificial
  Barcode component
  misc_feature (33)..(34): n is a, c, g, or t
  misc_feature (43)..(44): n is a, c, g, or t
  misc_feature (53)..(54): n is a, c, g, or t
tttttttaagcagtggtatcaacgcagagtacnntaggaagcnnagaggcatnntttttttttttttttttttttttttttttt

SEQ ID NO: 5183 - DNA, 84 bp, Artificial
  Barcode component
  misc_feature (33)..(34): n is a, c, g, or t
  misc_feature (43)..(44): n is a, c, g, or t
  misc_feature (53)..(54): n is a, c, g, or t
tttttttaagcagtggtatcaacgcagagtacnntaggaagcnntgcatagcnntttttttttttttttttttttttttttttt

SEQ ID NO: 5184 - DNA, 84 bp, Artificial
  Barcode component
  misc_feature (33)..(34): n is a, c, g, or t
  misc_feature (43)..(44): n is a, c, g, or t
  misc_feature (53)..(54): n is a, c, g, or t
tttttttaagcagtggtatcaacgcagagtacnntaggaagcnnctaacgganntttttttttttttttttttttttttttttt

SEQ ID NO: 5185 - DNA, 84 bp, Artificial
  Barcode component
  misc_feature (33)..(34): n is a, c, g, or t
  misc_feature (43)..(44): n is a, c, g, or t
  misc_feature (53)..(54): n is a, c, g, or t
tttttttaagcagtggtatcaacgcagagtacnntaggaagcnntatcgaggnntttttttttttttttttttttttttttttt

SEQ ID NO: 5186 - DNA, 84 bp, Artificial
  Barcode component
  misc_feature (33)..(34): n is a, c, g, or t
  misc_feature (43)..(44): n is a, c, g, or t
  misc_feature (53)..(54): n is a, c, g, or t
tttttttaagcagtggtatcaacgcagagtacnntaggaagcnncatagcctnntttttttttttttttttttttttttttttt

SEQ ID NO: 5187 - DNA, 84 bp, Artificial
  Barcode component
  misc_feature (33)..(34): n is a, c, g, or t
  misc_feature (43)..(44): n is a, c, g, or t
  misc_feature (53)..(54): n is a, c, g, or t
tttttttaagcagtggtatcaacgcagagtacnntaggaagcnnatcgagacnntttttttttttttttttttttttttttttt

SEQ ID NO: 5188 - DNA, 84 bp, Artificial
  Barcode component
  misc_feature (33)..(34): n is a, c, g, or t
  misc_feature (43)..(44): n is a, c, g, or t
  misc_feature (53)..(54): n is a, c, g, or t
tttttttaagcagtggtatcaacgcagagtacnntaggaagcnnggaagagtnntttttttttttttttttttttttttttttt

SEQ ID NO: 5189 - DNA, 84 bp, Artificial
  Barcode component
  misc_feature (33)..(34): n is a, c, g, or t
  misc_feature (43)..(44): n is a, c, g, or t
  misc_feature (53)..(54): n is a, c, g, or t
tttttttaagcagtggtatcaacgcagagtacnntaggaagcnnccaagtagnntttttttttttttttttttttttttttttt

SEQ ID NO: 5190 - DNA, 84 bp, Artificial
  Barcode component
  misc_feature (33)..(34): n is a, c, g, or t
  misc_feature (43)..(44): n is a, c, g, or t
  misc_feature (53)..(54): n is a, c, g, or t
tttttttaagcagtggtatcaacgcagagtacnntaggaagcnnctgaacagnntttttttttttttttttttttttttttttt

SEQ ID NO: 5191 - DNA, 84 bp, Artificial
  Barcode component
  misc_feature (33)..(34): n is a, c, g, or t
  misc_feature (43)..(44): n is a, c, g, or t
  misc_feature (53)..(54): n is a, c, g, or t
tttttttaagcagtggtatcaacgcagagtacnntaggaagcnngtaggttcnntttttttttttttttttttttttttttttt

SEQ ID NO: 5192 - DNA, 84 bp, Artificial
  Barcode component
  misc_feature (33)..(34): n is a, c, g, or t
  misc_feature (43)..(44): n is a, c, g, or t
  misc_feature (53)..(54): n is a, c, g, or t
tttttttaagcagtggtatcaacgcagagtacnntaggaagcnngtatggacnntttttttttttttttttttttttttttttt

SEQ ID NO: 5193 - DNA, 84 bp, Artificial
  Barcode component
  misc_feature (33)..(34): n is a, c, g, or t
  misc_feature (43)..(44): n is a, c, g, or t
  misc_feature (53)..(54): n is a, c, g, or t
tttttttaagcagtggtatcaacgcagagtacnntaggaagcnntcgcaacanntttttttttttttttttttttttttttttt

SEQ ID NO: 5194 - DNA, 84 bp, Artificial
  Barcode component
  misc_feature (33)..(34): n is a, c, g, or t
  misc_feature (43)..(44): n is a, c, g, or t
  misc_feature (53)..(54): n is a, c, g, or t
tttttttaagcagtggtatcaacgcagagtacnntaggaagcnnccgctaatnntttttttttttttttttttttttttttttt

SEQ ID NO: 5195 - DNA, 84 bp, Artificial
  Barcode component
  misc_feature (33)..(34): n is a, c, g, or t
  misc_feature (43)..(44): n is a, c, g, or t
  misc_feature (53)..(54): n is a, c, g, or t
tttttttaagcagtggtatcaacgcagagtacnntaggaagcnngattcgcanntttttttttttttttttttttttttttttt

SEQ ID NO: 5196 - DNA, 84 bp, Artificial
  Barcode component
  misc_feature (33)..(34): n is a, c, g, or t
  misc_feature (43)..(44): n is a, c, g, or t
  misc_feature (53)..(54): n is a, c, g, or t
tttttttaagcagtggtatcaacgcagagtacnntaggaagcnncgatggaanntttttttttttttttttttttttttttttt

SEQ ID NO: 5197 - DNA, 84 bp, Artificial
  Barcode component
  misc_feature (33)..(34): n is a, c, g, or t
  misc_feature (43)..(44): n is a, c, g, or t
  misc_feature (53)..(54): n is a, c, g, or t
tttttttaagcagtggtatcaacgcagagtacnntaggaagcnnagcaagganntttttttttttttttttttttttttttttt

SEQ ID NO: 5198 - DNA, 84 bp, Artificial
  Barcode component
  misc_feature (33)..(34): n is a, c, g, or t
  misc_feature (43)..(44): n is a, c, g, or t
  misc_feature (53)..(54): n is a, c, g, or t
tttttttaagcagtggtatcaacgcagagtacnntaggaagcnncgtagcaanntttttttttttttttttttttttttttttt

SEQ ID NO: 5199 - DNA, 84 bp, Artificial
  Barcode component
  misc_feature (33)..(34): n is a, c, g, or t
  misc_feature (43)..(44): n is a, c, g, or t
  misc_feature (53)..(54): n is a, c, g, or t
tttttttaagcagtggtatcaacgcagagtacnntaggaagcnntggcagtanntttttttttttttttttttttttttttttt

SEQ ID NO: 5200 - DNA, 84 bp, Artificial
  Barcode component
  misc_feature (33)..(34): n is a, c, g, or t
  misc_feature (43)..(44): n is a, c, g, or t
  misc_feature (53)..(54): n is a, c, g, or t
tttttttaagcagtggtatcaacgcagagtacnntaggaagcnncggtagttnntttttttttttttttttttttttttttttt

SEQ ID NO: 5201 - DNA, 84 bp, Artificial
  Barcode component
  misc_feature (33)..(34): n is a, c, g, or t
  misc_feature (43)..(44): n is a, c, g, or t
  misc_feature (53)..(54): n is a, c, g, or t
tttttttaagcagtggtatcaacgcagagtacnntaggaagcnntgacttcgnntttttttttttttttttttttttttttttt

SEQ ID NO: 5202 - DNA, 84 bp, Artificial
  Barcode component
  misc_feature (33)..(34): n is a, c, g, or t
  misc_feature (43)..(44): n is a, c, g, or t
  misc_feature (53)..(54): n is a, c, g, or t
tttttttaagcagtggtatcaacgcagagtacnntaggaagcnngagtgcaanntttttttttttttttttttttttttttttt

SEQ ID NO: 5203 - DNA, 84 bp, Artificial
  Barcode component
  misc_feature (33)..(34): n is a, c, g, or t
  misc_feature (43)..(44): n is a, c, g, or t
  misc_feature (53)..(54): n is a, c, g, or t
tttttttaagcagtggtatcaacgcagagtacnntaggaagcnnacggtaacnntttttttttttttttttttttttttttttt

SEQ ID NO: 5204 - DNA, 84 bp, Artificial
  Barcode component
  misc_feature (33)..(34): n is a, c, g, or t
  misc_feature (43)..(44): n is a, c, g, or t
  misc_feature (53)..(54): n is a, c, g, or t
tttttttaagcagtggtatcaacgcagagtacnntaggaagcnnaagtggtgnntttttttttttttttttttttttttttttt

SEQ ID NO: 5205 - DNA, 84 bp, Artificial
  Barcode component
  misc_feature (33)..(34): n is a, c, g, or t
  misc_feature (43)..(44): n is a, c, g, or t
  misc_feature (53)..(54): n is a, c, g, or t
tttttttaagcagtggtatcaacgcagagtacnntaggaagcnnggagacaanntttttttttttttttttttttttttttttt

SEQ ID NO: 5206 - DNA, 84 bp, Artificial
  Barcode component
  misc_feature (33)..(34): n is a, c, g, or t
  misc_feature (43)..(44): n is a, c, g, or t
  misc_feature (53)..(54): n is a, c, g, or t
tttttttaagcagtggtatcaacgcagagtacnntaggaagcnntcaaggacnntttttttttttttttttttttttttttttt

SEQ ID NO: 5207 - DNA, 84 bp, Artificial
  Barcode component
  misc_feature (33)..(34): n is a, c, g, or t
  misc_feature (43)..(44): n is a, c, g, or t
  misc_feature (53)..(54): n is a, c, g, or t
tttttttaagcagtggtatcaacgcagagtacnntaggaagcnnaagagagcnntttttttttttttttttttttttttttttt

SEQ ID NO: 5208 - DNA, 84 bp, Artificial
  Barcode component
  misc_feature (33)..(34): n is a, c, g, or t
  misc_feature (43)..(44): n is a, c, g, or t
  misc_feature (53)..(54): n is a, c, g, or t
tttttttaagcagtggtatcaacgcagagtacnntaggaagcnncgagagatnntttttttttttttttttttttttttttttt

SEQ ID NO: 5209 - DNA, 84 bp, Artificial
  Barcode component
  misc_feature (33)..(34): n is a, c, g, or t
  misc_feature (43)..(44): n is a, c, g, or t
  misc_feature (53)..(54): n is a, c, g, or t
tttttttaagcagtggtatcaacgcagagtacnntaggaagcnnacagatggnntttttttttttttttttttttttttttttt

SEQ ID NO: 5210 - DNA, 84 bp, Artificial
  Barcode component
  misc_feature (33)..(34): n is a, c, g, or t
  misc_feature (43)..(44): n is a, c, g, or t
  misc_feature (53)..(54): n is a, c, g, or t
tttttttaagcagtggtatcaacgcagagtacnntaggaagcnnaggagtcanntttttttttttttttttttttttttttttt

SEQ ID NO: 5211 - DNA, 84 bp, Artificial
  Barcode component
  misc_feature (33)..(34): n is a, c, g, or t
  misc_feature (43)..(44): n is a, c, g, or t
  misc_feature (53)..(54): n is a, c, g, or t
tttttttaagcagtggtatcaacgcagagtacnntaggaagcnncgtgttacnntttttttttttttttttttttttttttttt

SEQ ID NO: 5212 - DNA, 84 bp, Artificial
  Barcode component
  misc_feature (33)..(34): n is a, c, g, or t
  misc_feature (43)..(44): n is a, c, g, or t
  misc_feature (53)..(54): n is a, c, g, or t
tttttttaagcagtggtatcaacgcagagtacnntaggaagcnntagtgtgcnntttttttttttttttttttttttttttttt

SEQ ID NO: 5213 - DNA, 84 bp, Artificial
  Barcode component
  misc_feature (33)..(34): n is a, c, g, or t
  misc_feature (43)..(44): n is a, c, g, or t
  misc_feature (53)..(54): n is a, c, g, or t
tttttttaagcagtggtatcaacgcagagtacnntaggaagcnnctcatgacnntttttttttttttttttttttttttttttt

SEQ ID NO: 5214 - DNA, 84 bp, Artificial
  Barcode component
  misc_feature (33)..(34): n is a, c, g, or t
  misc_feature (43)..(44): n is a, c, g, or t
  misc_feature (53)..(54): n is a, c, g, or t
tttttttaagcagtggtatcaacgcagagtacnntaggaagcnngtatccagnntttttttttttttttttttttttttttttt

SEQ ID NO: 5215 - DNA, 84 bp, Artificial
  Barcode component
  misc_feature (33)..(34): n is a, c, g, or t
  misc_feature (43)..(44): n is a, c, g, or t
  misc_feature (53)..(54): n is a, c, g, or t
tttttttaagcagtggtatcaacgcagagtacnntaggaagcnnacgcctatnntttttttttttttttttttttttttttttt

SEQ ID NO: 5216 - DNA, 84 bp, Artificial
  Barcode component
  misc_feature (33)..(34): n is a, c, g, or t
  misc_feature (43)..(44): n is a, c, g, or t
  misc_feature (53)..(54): n is a, c, g, or t
tttttttaagcagtggtatcaacgcagagtacnntaggaagcnnaacgacctnntttttttttttttttttttttttttttttt

SEQ ID NO: 5217 - DNA, 84 bp, Artificial
  Barcode component
  misc_feature (33)..(34): n is a, c, g, or t
  misc_feature (43)..(44): n is a, c, g, or t
  misc_feature (53)..(54): n is a, c, g, or t
tttttttaagcagtggtatcaacgcagagtacnntaggaagcnnatcaggctnntttttttttttttttttttttttttttttt

SEQ ID NO: 5218 - DNA, 84 bp, Artificial
  Barcode component
  misc_feature (33)..(34): n is a, c, g, or t
  misc_feature (43)..(44): n is a, c, g, or t
  misc_feature (53)..(54): n is a, c, g, or t
tttttttaagcagtggtatcaacgcagagtacnntaggaagcnncaagttcgnntttttttttttttttttttttttttttttt

SEQ ID NO: 5219 - DNA, 84 bp, Artificial
  Barcode component
  misc_feature (33)..(34): n is a, c, g, or t
  misc_feature (43)..(44): n is a, c, g, or t
  misc_feature (53)..(54): n is a, c, g, or t
tttttttaagcagtggtatcaacgcagagtacnntaggaagcnntagccaganntttttttttttttttttttttttttttttt

SEQ ID NO: 5220 - DNA, 84 bp, Artificial
  Barcode component
  misc_feature (33)..(34): n is a, c, g, or t
  misc_feature (43)..(44): n is a, c, g, or t
  misc_feature (53)..(54): n is a, c, g, or t
tttttttaagcagtggtatcaacgcagagtacnntaggaagcnncaatcacgnntttttttttttttttttttttttttttttt

SEQ ID NO: 5221 - DNA, 84 bp, Artificial
  Barcode component
  misc_feature (33)..(34): n is a, c, g, or t
  misc_feature (43)..(44): n is a, c, g, or t
  misc_feature (53)..(54): n is a, c, g, or t
tttttttaagcagtggtatcaacgcagagtacnntaggaagcnngcaacaagnntttttttttttttttttttttttttttttt

SEQ ID NO: 5222 - DNA, 84 bp, Artificial
  Barcode component
  misc_feature (33)..(34): n is a, c, g, or t
  misc_feature (43)..(44): n is a, c, g, or t
  misc_feature (53)..(54): n is a, c, g, or t
tttttttaagcagtggtatcaacgcagagtacnntaggaagcnncacgacaanntttttttttttttttttttttttttttttt

SEQ ID NO: 5223 - DNA, 84 bp, Artificial
  Barcode component
  misc_feature (33)..(34): n is a, c, g, or t
  misc_feature (43)..(44): n is a, c, g, or t
  misc_feature (53)..(54): n is a, c, g, or t
tttttttaagcagtggtatcaacgcagagtacnntaggaagcnntacggaganntttttttttttttttttttttttttttttt

SEQ ID NO: 5224 - DNA, 84 bp, Artificial
  Barcode component
  misc_feature (33)..(34): n is a, c, g, or t
  misc_feature (43)..(44): n is a, c, g, or t
  misc_feature (53)..(54): n is a, c, g, or t
tttttttaagcagtggtatcaacgcagagtacnntaggaagcnncgacaaganntttttttttttttttttttttttttttttt

SEQ ID NO: 5225 - DNA, 84 bp, Artificial
  Barcode component
  misc_feature (33)..(34): n is a, c, g, or t
  misc_feature (43)..(44): n is a, c, g, or t
  misc_feature (53)..(54): n is a, c, g, or t
tttttttaagcagtggtatcaacgcagagtacnntaggaagcnncgaagtganntttttttttttttttttttttttttttttt

SEQ ID NO: 5226 - DNA, 84 bp, Artificial
  Barcode component
  misc_feature (33)..(34): n is a, c, g, or t
  misc_feature (43)..(44): n is a, c, g, or t
  misc_feature (53)..(54): n is a, c, g, or t
tttttttaagcagtggtatcaacgcagagtacnntaggaagcnnagctggtanntttttttttttttttttttttttttttttt

SEQ ID NO: 5227 - DNA, 84 bp, Artificial
  Barcode component
  misc_feature (33)..(34): n is a, c, g, or t
  misc_feature (43)..(44): n is a, c, g, or t
  misc_feature (53)..(54): n is a, c, g, or t
tttttttaagcagtggtatcaacgcagagtacnntaggaagcnnaactaggcnntttttttttttttttttttttttttttttt

SEQ ID NO: 5228 - DNA, 84 bp, Artificial
  Barcode component
  misc_feature (33)..(34): n is a, c, g, or t
  misc_feature (43)..(44): n is a, c, g, or t
  misc_feature (53)..(54): n is a, c, g, or t
tttttttaagcagtggtatcaacgcagagtacnntaggaagcnncagcaagtnntttttttttttttttttttttttttttttt

SEQ ID NO: 5229 - DNA, 84 bp, Artificial
  Barcode component
  misc_feature (33)..(34): n is a, c, g, or t
  misc_feature (43)..(44): n is a, c, g, or t
  misc_feature (53)..(54): n is a, c, g, or t
tttttttaagcagtggtatcaacgcagagtacnntaggaagcnnacgaggtanntttttttttttttttttttttttttttttt

SEQ ID NO: 5230 - DNA, 84 bp, Artificial
  Barcode component
  misc_feature (33)..(34): n is a, c, g, or t
  misc_feature (43)..(44): n is a, c, g, or t
  misc_feature (53)..(54): n is a, c, g, or t
tttttttaagcagtggtatcaacgcagagtacnntaggaagcnncatcttccnntttttttttttttttttttttttttttttt

SEQ ID NO: 5231 - DNA, 84 bp, Artificial
  Barcode component
  misc_feature (33)..(34): n is a, c, g, or t
  misc_feature (43)..(44): n is a, c, g, or t
  misc_feature (53)..(54): n is a, c, g, or t
tttttttaagcagtggtatcaacgcagagtacnntaggaagcnncctgaatcnntttttttttttttttttttttttttttttt

SEQ ID NO: 5232 - DNA, 84 bp, Artificial
  Barcode component
  misc_feature (33)..(34): n is a, c, g, or t
  misc_feature (43)..(44): n is a, c, g, or t
  misc_feature (53)..(54): n is a, c, g, or t
tttttttaagcagtggtatcaacgcagagtacnntaggaagcnntgcagactnntttttttttttttttttttttttttttttt

SEQ ID NO: 5233 - DNA, 84 bp, Artificial
  Barcode component
  misc_feature (33)..(34): n is a, c, g, or t
  misc_feature (43)..(44): n is a, c, g, or t
  misc_feature (53)..(54): n is a, c, g, or t
tttttttaagcagtggtatcaacgcagagtacnntaggaagcnnagatgtggnntttttttttttttttttttttttttttttt

SEQ ID NO: 5234 - DNA, 84 bp, Artificial
  Barcode component
  misc_feature (33)..(34): n is a, c, g, or t
  misc_feature (43)..(44): n is a, c, g, or t
  misc_feature (53)..(54): n is a, c, g, or t
tttttttaagcagtggtatcaacgcagagtacnntaggaagcnnagttcgacnntttttttttttttttttttttttttttttt

SEQ ID NO: 5235 - DNA, 84 bp, Artificial
  Barcode component
  misc_feature (33)..(34): n is a, c, g, or t
  misc_feature (43)..(44): n is a, c, g, or t
  misc_feature (53)..(54): n is a, c, g, or t
tttttttaagcagtggtatcaacgcagagtacnntaggaagcnnacaacctcnntttttttttttttttttttttttttttttt

SEQ ID NO: 5236 - DNA, 84 bp, Artificial
  Barcode component
  misc_feature (33)..(34): n is a, c, g, or t
  misc_feature (43)..(44): n is a, c, g, or t
  misc_feature (53)..(54): n is a, c, g, or t
tttttttaagcagtggtatcaacgcagagtacnntaggaagcnncatggtagnntttttttttttttttttttttttttttttt

SEQ ID NO: 5237 - DNA, 84 bp, Artificial
  Barcode component
  misc_feature (33)..(34): n is a, c, g, or t
  misc_feature (43)..(44): n is a, c, g, or t
  misc_feature (53)..(54): n is a, c, g, or t
tttttttaagcagtggtatcaacgcagagtacnntaggaagcnncgtatctcnntttttttttttttttttttttttttttttt

SEQ ID NO: 5238 - DNA, 84 bp, Artificial
  Barcode component
  misc_feature (33)..(34): n is a, c, g, or t
  misc_feature (43)..(44): n is a, c, g, or t
  misc_feature (53)..(54): n is a, c, g, or t
tttttttaagcagtggtatcaacgcagagtacnntaggaagcnncctagttcnntttttttttttttttttttttttttttttt

SEQ ID NO: 5239 - DNA, 84 bp, Artificial
  Barcode component
  misc_feature (33)..(34): n is a, c, g, or t
  misc_feature (43)..(44): n is a, c, g, or t
  misc_feature (53)..(54): n is a, c, g, or t
tttttttaagcagtggtatcaacgcagagtacnntaggaagcnncaagagtcnntttttttttttttttttttttttttttttt

SEQ ID NO: 5240 - DNA, 84 bp, Artificial
  Barcode component
  misc_feature (33)..(34): n is a, c, g, or t
  misc_feature (43)..(44): n is a, c, g, or t
  misc_feature (53)..(54): n is a, c, g, or t
tttttttaagcagtggtatcaacgcagagtacnnttcaggagnnaatcggcanntttttttttttttttttttttttttttttt

SEQ ID NO: 5241 - DNA, 84 bp, Artificial
  Barcode component
  misc_feature (33)..(34): n is a, c, g, or t
  misc_feature (43)..(44): n is a, c, g, or t
  misc_feature (53)..(54): n is a, c, g, or t
tttttttaagcagtggtatcaacgcagagtacnnttcaggagnntacggcatnntttttttttttttttttttttttttttttt

SEQ ID NO: 5242 - DNA, 84 bp, Artificial
  Barcode component
  misc_feature (33)..(34): n is a, c, g, or t
  misc_feature (43)..(44): n is a, c, g, or t
  misc_feature (53)..(54): n is a, c, g, or t
tttttttaagcagtggtatcaacgcagagtacnnttcaggagnnttggatcgnntttttttttttttttttttttttttttttt

SEQ ID NO: 5243 - DNA, 84 bp, Artificial
  Barcode component
  misc_feature (33)..(34): n is a, c, g, or t
  misc_feature (43)..(44): n is a, c, g, or t
  misc_feature (53)..(54): n is a, c, g, or t
tttttttaagcagtggtatcaacgcagagtacnnttcaggagnntggaacganntttttttttttttttttttttttttttttt

SEQ ID NO: 5244 - DNA, 84 bp, Artificial
  Barcode component
  misc_feature (33)..(34): n is a, c, g, or t
  misc_feature (43)..(44): n is a, c, g, or t
  misc_feature (53)..(54): n is a, c, g, or t
tttttttaagcagtggtatcaacgcagagtacnnttcaggagnnggcaatcanntttttttttttttttttttttttttttttt

SEQ ID NO: 5245 - DNA, 84 bp, Artificial
  Barcode component
  misc_feature (33)..(34): n is a, c, g, or t
  misc_feature (43)..(44): n is a, c, g, or t
  misc_feature (53)..(54): n is a, c, g, or t
tttttttaagcagtggtatcaacgcagagtacnnttcaggagnngaatccganntttttttttttttttttttttttttttttt

SEQ ID NO: 5246 - DNA, 84 bp, Artificial
  Barcode component
  misc_feature (33)..(34): n is a, c, g, or t
  misc_feature (43)..(44): n is a, c, g, or t
  misc_feature (53)..(54): n is a, c, g, or t
tttttttaagcagtggtatcaacgcagagtacnnttcaggagnnttacggtgnntttttttttttttttttttttttttttttt

SEQ ID NO: 5247 - DNA, 84 bp, Artificial
  Barcode component
  misc_feature (33)..(34): n is a, c, g, or t
  misc_feature (43)..(44): n is a, c, g, or t
  misc_feature (53)..(54): n is a, c, g, or t
tttttttaagcagtggtatcaacgcagagtacnnttcaggagnncatatcggnntttttttttttttttttttttttttttttt

SEQ ID NO: 5248 - DNA, 84 bp, Artificial
  Barcode component
  misc_feature (33)..(34): n is a, c, g, or t
  misc_feature (43)..(44): n is a, c, g, or t
  misc_feature (53)..(54): n is a, c, g, or t
tttttttaagcagtggtatcaacgcagagtacnnttcaggagnncttcggtanntttttttttttttttttttttttttttttt

SEQ ID NO: 5249 - DNA, 84 bp, Artificial
  Barcode component
  misc_feature (33)..(34): n is a, c, g, or t
  misc_feature (43)..(44): n is a, c, g, or t
  misc_feature (53)..(54): n is a, c, g, or t
tttttttaagcagtggtatcaacgcagagtacnnttcaggagnntcctaacgnntttttttttttttttttttttttttttttt

SEQ ID NO: 5250 - DNA, 84 bp, Artificial
  Barcode component
  misc_feature (33)..(34): n is a, c, g, or t
  misc_feature (43)..(44): n is a, c, g, or t
  misc_feature (53)..(54): n is a, c, g, or t
tttttttaagcagtggtatcaacgcagagtacnnttcaggagnngtaagccanntttttttttttttttttttttttttttttt

SEQ ID NO: 5251 - DNA, 84 bp, Artificial
  Barcode component
  misc_feature (33)..(34): n is a, c, g, or t
  misc_feature (43)..(44): n is a, c, g, or t
  misc_feature (53)..(54): n is a, c, g, or t
tttttttaagcagtggtatcaacgcagagtacnnttcaggagnntaaggtggnntttttttttttttttttttttttttttttt

SEQ ID NO: 5252 - DNA, 84 bp, Artificial
  Barcode component
  misc_feature (33)..(34): n is a, c, g, or t
  misc_feature (43)..(44): n is a, c, g, or t
  misc_feature (53)..(54): n is a, c, g, or t
tttttttaagcagtggtatcaacgcagagtacnnttcaggagnnggtaagctnntttttttttttttttttttttttttttttt

SEQ ID NO: 5253 - DNA, 84 bp, Artificial
  Barcode component
  misc_feature (33)..(34): n is a, c, g, or t
  misc_feature (43)..(44): n is a, c, g, or t
  misc_feature (53)..(54): n is a, c, g, or t
tttttttaagcagtggtatcaacgcagagtacnnttcaggagnntgtgtcganntttttttttttttttttttttttttttttt

SEQ ID NO: 5254 - DNA, 84 bp, Artificial
  Barcode component
  misc_feature (33)..(34): n is a, c, g, or t
  misc_feature (43)..(44): n is a, c, g, or t
  misc_feature (53)..(54): n is a, c, g, or t
tttttttaagcagtggtatcaacgcagagtacnnttcaggagnngagcatganntttttttttttttttttttttttttttttt

SEQ ID NO: 5255 - DNA, 84 bp, Artificial
  Barcode component
  misc_feature (33)..(34): n is a, c, g, or t
  misc_feature (43)..(44): n is a, c, g, or t
  misc_feature (53)..(54): n is a, c, g, or t
tttttttaagcagtggtatcaacgcagagtacnnttcaggagnntcgaagtcnntttttttttttttttttttttttttttttt

SEQ ID NO: 5256 - DNA, 84 bp, Artificial
  Barcode component
  misc_feature (33)..(34): n is a, c, g, or t
  misc_feature (43)..(44): n is a, c, g, or t
  misc_feature (53)..(54): n is a, c, g, or t
tttttttaagcagtggtatcaacgcagagtacnnttcaggagnnggtgaacanntttttttttttttttttttttttttttttt

SEQ ID NO: 5257 - DNA, 84 bp, Artificial
  Barcode component
  misc_feature (33)..(34): n is a, c, g, or t
  misc_feature (43)..(44): n is a, c, g, or t
  misc_feature (53)..(54): n is a, c, g, or t
tttttttaagcagtggtatcaacgcagagtacnnttcaggagnnacatgcacnntttttttttttttttttttttttttttttt

SEQ ID NO: 5258 - DNA, 84 bp, Artificial
  Barcode component
  misc_feature (33)..(34): n is a, c, g, or t
  misc_feature (43)..(44): n is a, c, g, or t
  misc_feature (53)..(54): n is a, c, g, or t
tttttttaagcagtggtatcaacgcagagtacnnttcaggagnnccaacagtnntttttttttttttttttttttttttttttt

SEQ ID NO: 5259 - DNA, 84 bp, Artificial
  Barcode component
  misc_feature (33)..(34): n is a, c, g, or t
  misc_feature (43)..(44): n is a, c, g, or t
  misc_feature (53)..(54): n is a, c, g, or t
tttttttaagcagtggtatcaacgcagagtacnnttcaggagnnagaacagcnntttttttttttttttttttttttttttttt

SEQ ID NO: 5260 - DNA, 84 bp, Artificial
  Barcode component
  misc_feature (33)..(34): n is a, c, g, or t
  misc_feature (43)..(44): n is a, c, g, or t
  misc_feature (53)..(54): n is a, c, g, or t
tttttttaagcagtggtatcaacgcagagtacnnttcaggagnngaacacgtnntttttttttttttttttttttttttttttt

SEQ ID NO: 5261 - DNA, 84 bp, Artificial
  Barcode component
  misc_feature (33)..(34): n is a, c, g, or t
  misc_feature (43)..(44): n is a, c, g, or t
  misc_feature (53)..(54): n is a, c, g, or t
tttttttaagcagtggtatcaacgcagagtacnnttcaggagnnggtcttcanntttttttttttttttttttttttttttttt

SEQ ID NO: 5262 - DNA, 84 bp, Artificial
  Barcode component
  misc_feature (33)..(34): n is a, c, g, or t
  misc_feature (43)..(44): n is a, c, g, or t
  misc_feature (53)..(54): n is a, c, g, or t
tttttttaagcagtggtatcaacgcagagtacnnttcaggagnnaggttcagnntttttttttttttttttttttttttttttt

SEQ ID NO: 5263 - DNA, 84 bp, Artificial
  Barcode component
  misc_feature (33)..(34): n is a, c, g, or t
  misc_feature (43)..(44): n is a, c, g, or t
  misc_feature (53)..(54): n is a, c, g, or t
tttttttaagcagtggtatcaacgcagagtacnnttcaggagnnctagagcanntttttttttttttttttttttttttttttt

SEQ ID NO: 5264 - DNA, 84 bp, Artificial
  Barcode component
  misc_feature (33)..(34): n is a, c, g, or t
  misc_feature (43)..(44): n is a, c, g, or t
  misc_feature (53)..(54): n is a, c, g, or t
tttttttaagcagtggtatcaacgcagagtacnnttcaggagnncttctagcnntttttttttttttttttttttttttttttt

SEQ ID NO: 5265 - DNA, 84 bp, Artificial
  Barcode component
  misc_feature (33)..(34): n is a, c, g, or t
  misc_feature (43)..(44): n is a, c, g, or t
  misc_feature (53)..(54): n is a, c, g, or t
tttttttaagcagtggtatcaacgcagagtacnnttcaggagnngagtaacgnntttttttttttttttttttttttttttttt

SEQ ID NO: 5266 - DNA, 84 bp, Artificial
  Barcode component
  misc_feature (33)..(34): n is a, c, g, or t
  misc_feature (43)..(44): n is a, c, g, or t
  misc_feature (53)..(54): n is a, c, g, or t
tttttttaagcagtggtatcaacgcagagtacnnttcaggagnnctaagaggnntttttttttttttttttttttttttttttt

SEQ ID NO: 5267 - DNA, 84 bp, Artificial
  Barcode component
  misc_feature (33)..(34): n is a, c, g, or t
  misc_feature (43)..(44): n is a, c, g, or t
  misc_feature (53)..(54): n is a, c, g, or t
tttttttaagcagtggtatcaacgcagagtacnnttcaggagnnacgtgtagnntttttttttttttttttttttttttttttt

SEQ ID NO: 5268 - DNA, 84 bp, Artificial
  Barcode component
  misc_feature (33)..(34): n is a, c, g, or t
  misc_feature (43)..(44): n is a, c, g, or t
  misc_feature (53)..(54): n is a, c, g, or t
tttttttaagcagtggtatcaacgcagagtacnnttcaggagnnactacaggnntttttttttttttttttttttttttttttt

SEQ ID NO: 5269 - DNA, 84 bp, Artificial
  Barcode component
  misc_feature (33)..(34): n is a, c, g, or t
  misc_feature (43)..(44): n is a, c, g, or t
  misc_feature (53)..(54): n is a, c, g, or t
tttttttaagcagtggtatcaacgcagagtacnnttcaggagnntacaggtcnntttttttttttttttttttttttttttttt

SEQ ID NO: 5270 - DNA, 84 bp, Artificial
  Barcode component
  misc_feature (33)..(34): n is a, c, g, or t
  misc_feature (43)..(44): n is a, c, g, or t
  misc_feature (53)..(54): n is a, c, g, or t
tttttttaagcagtggtatcaacgcagagtacnnttcaggagnnctcacatgnntttttttttttttttttttttttttttttt

SEQ ID NO: 5271 - DNA, 84 bp, Artificial
  Barcode component
  misc_feature (33)..(34): n is a, c, g, or t
  misc_feature (43)..(44): n is a, c, g, or t
  misc_feature (53)..(54): n is a, c, g, or t
tttttttaagcagtggtatcaacgcagagtacnnttcaggagnnactaggagnntttttttttttttttttttttttttttttt

SEQ ID NO: 5272 - DNA, 84 bp, Artificial
  Barcode component
  misc_feature (33)..(34): n is a, c, g, or t
  misc_feature (43)..(44): n is a, c, g, or t
  misc_feature (53)..(54): n is a, c, g, or t
tttttttaagcagtggtatcaacgcagagtacnnttcaggagnnccatagganntttttttttttttttttttttttttttttt

SEQ ID NO: 5273 - DNA, 84 bp, Artificial
  Barcode component
  misc_feature (33)..(34): n is a, c, g, or t
  misc_feature (43)..(44): n is a, c, g, or t
  misc_feature (53)..(54): n is a, c, g, or t
tttttttaagcagtggtatcaacgcagagtacnnttcaggagnnggagaatcnntttttttttttttttttttttttttttttt

SEQ ID NO: 5274 - DNA, 84 bp, Artificial
  Barcode component
  misc_feature (33)..(34): n is a, c, g, or t
  misc_feature (43)..(44): n is a, c, g, or t
  misc_feature (53)..(54): n is a, c, g, or t
tttttttaagcagtggtatcaacgcagagtacnnttcaggagnngccaagaanntttttttttttttttttttttttttttttt

SEQ ID NO: 5275 - DNA, 84 bp, Artificial
  Barcode component
  misc_feature (33)..(34): n is a, c, g, or t
  misc_feature (43)..(44): n is a, c, g, or t
  misc_feature (53)..(54): n is a, c, g, or t
tttttttaagcagtggtatcaacgcagagtacnnttcaggagnnaaggcaagnntttttttttttttttttttttttttttttt

SEQ ID NO: 5276 - DNA, 84 bp, Artificial
  Barcode component
  misc_feature (33)..(34): n is a, c, g, or t
  misc_feature (43)..(44): n is a, c, g, or t
  misc_feature (53)..(54): n is a, c, g, or t
tttttttaagcagtggtatcaacgcagagtacnnttcaggagnnaatgtcgcnntttttttttttttttttttttttttttttt

SEQ ID NO: 5277 - DNA, 84 bp, Artificial
  Barcode component
  misc_feature (33)..(34): n is a, c, g, or t
  misc_feature (43)..(44): n is a, c, g, or t
  misc_feature (53)..(54): n is a, c, g, or t
tttttttaagcagtggtatcaacgcagagtacnnttcaggagnnatggaaccnntttttttttttttttttttttttttttttt

SEQ ID NO: 5278 - DNA, 84 bp, Artificial
  Barcode component
  misc_feature (33)..(34): n is a, c, g, or t
  misc_feature (43)..(44): n is a, c, g, or t
  misc_feature (53)..(54): n is a, c, g, or t
tttttttaagcagtggtatcaacgcagagtacnnttcaggagnnagaggcatnntttttttttttttttttttttttttttttt

SEQ ID NO: 5279 - DNA, 84 bp, Artificial
  Barcode component
  misc_feature (33)..(34): n is a, c, g, or t
  misc_feature (43)..(44): n is a, c, g, or t
  misc_feature (53)..(54): n is a, c, g, or t
tttttttaagcagtggtatcaacgcagagtacnnttcaggagnntgcatagcnntttttttttttttttttttttttttttttt

SEQ ID NO: 5280 - DNA, 84 bp, Artificial
  Barcode component
  misc_feature (33)..(34): n is a, c, g, or t
  misc_feature (43)..(44): n is a, c, g, or t
  misc_feature (53)..(54): n is a, c, g, or t
tttttttaagcagtggtatcaacgcagagtacnnttcaggagnnctaacgganntttttttttttttttttttttttttttttt

SEQ ID NO: 5281 - DNA, 84 bp, Artificial
  Barcode component
  misc_feature (33)..(34): n is a, c, g, or t
  misc_feature (43)..(44): n is a, c, g, or t
  misc_feature (53)..(54): n is a, c, g, or t
tttttttaagcagtggtatcaacgcagagtacnnttcaggagnntatcgaggnntttttttttttttttttttttttttttttt

SEQ ID NO: 5282 - DNA, 84 bp, Artificial
  Barcode component
  misc_feature (33)..(34): n is a, c, g, or t
  misc_feature (43)..(44): n is a, c, g, or t
  misc_feature (53)..(54): n is a, c, g, or t
tttttttaagcagtggtatcaacgcagagtacnnttcaggagnncatagcctnntttttttttttttttttttttttttttttt

SEQ ID NO: 5283 - DNA, 84 bp, Artificial
  Barcode component
  misc_feature (33)..(34): n is a, c, g, or t
  misc_feature (43)..(44): n is a, c, g, or t
  misc_feature (53)..(54): n is a, c, g, or t
tttttttaagcagtggtatcaacgcagagtacnnttcaggagnnatcgagacnntttttttttttttttttttttttttttttt

SEQ ID NO: 5284 - DNA, 84 bp, Artificial
  Barcode component
  misc_feature (33)..(34): n is a, c, g, or t
  misc_feature (43)..(44): n is a, c, g, or t
  misc_feature (53)..(54): n is a, c, g, or t
tttttttaagcagtggtatcaacgcagagtacnnttcaggagnnggaagagtnntttttttttttttttttttttttttttttt

SEQ ID NO: 5285 - DNA, 84 bp, Artificial
  Barcode component
  misc_feature (33)..(34): n is a, c, g, or t
  misc_feature (43)..(44): n is a, c, g, or t
  misc_feature (53)..(54): n is a, c, g, or t
tttttttaagcagtggtatcaacgcagagtacnnttcaggagnnccaagtagnntttttttttttttttttttttttttttttt

SEQ ID NO: 5286 - DNA, 84 bp, Artificial
  Barcode component
  misc_feature (33)..(34): n is a, c, g, or t
  misc_feature (43)..(44): n is a, c, g, or t
  misc_feature (53)..(54): n is a, c, g, or t
tttttttaagcagtggtatcaacgcagagtacnnttcaggagnnctgaacagnntttttttttttttttttttttttttttttt

SEQ ID NO: 5287 - DNA, 84 bp, Artificial
  Barcode component
  misc_feature (33)..(34): n is a, c, g, or t
  misc_feature (43)..(44): n is a, c, g, or t
  misc_feature (53)..(54): n is a, c, g, or t
tttttttaagcagtggtatcaacgcagagtacnnttcaggagnngtaggttcnntttttttttttttttttttttttttttttt

SEQ ID NO: 5288 - DNA, 84 bp, Artificial
  Barcode component
  misc_feature (33)..(34): n is a, c, g, or t
  misc_feature (43)..(44): n is a, c, g, or t
  misc_feature (53)..(54): n is a, c, g, or t
tttttttaagcagtggtatcaacgcagagtacnnttcaggagnngtatggacnntttttttttttttttttttttttttttttt

SEQ ID NO: 5289 - DNA, 84 bp, Artificial
  Barcode component
  misc_feature (33)..(34): n is a, c, g, or t
  misc_feature (43)..(44): n is a, c, g, or t
  misc_feature (53)..(54): n is a, c, g, or t
tttttttaagcagtggtatcaacgcagagtacnnttcaggagnntcgcaacanntttttttttttttttttttttttttttttt

SEQ ID NO: 5290 - DNA, 84 bp, Artificial
  Barcode component
  misc_feature (33)..(34): n is a, c, g, or t
  misc_feature (43)..(44): n is a, c, g, or t
  misc_feature (53)..(54): n is a, c, g, or t
tttttttaagcagtggtatcaacgcagagtacnnttcaggagnnccgctaatnntttttttttttttttttttttttttttttt

SEQ ID NO: 5291 - DNA, 84 bp, Artificial
  Barcode component
  misc_feature (33)..(34): n is a, c, g, or t
  misc_feature (43)..(44): n is a, c, g, or t
  misc_feature (53)..(54): n is a, c, g, or t
tttttttaagcagtggtatcaacgcagagtacnnttcaggagnngattcgcanntttttttttttttttttttttttttttttt

SEQ ID NO: 5292 - DNA, 84 bp, Artificial
  Barcode component
  misc_feature (33)..(34): n is a, c, g, or t
  misc_feature (43)..(44): n is a, c, g, or t
  misc_feature (53)..(54): n is a, c, g, or t
tttttttaagcagtggtatcaacgcagagtacnnttcaggagnncgatggaanntttttttttttttttttttttttttttttt

SEQ ID NO: 5293 - DNA, 84 bp, Artificial
  Barcode component
  misc_feature (33)..(34): n is a, c, g, or t
  misc_feature (43)..(44): n is a, c, g, or t
  misc_feature (53)..(54): n is a, c, g, or t
tttttttaagcagtggtatcaacgcagagtacnnttcaggagnnagcaagganntttttttttttttttttttttttttttttt

SEQ ID NO: 5294 - DNA, 84 bp, Artificial
  Barcode component
  misc_feature (33)..(34): n is a, c, g, or t
  misc_feature (43)..(44): n is a, c, g, or t
  misc_feature (53)..(54): n is a, c, g, or t
tttttttaagcagtggtatcaacgcagagtacnnttcaggagnncgtagcaanntttttttttttttttttttttttttttttt

SEQ ID NO: 5295 - DNA, 84 bp, Artificial
  Barcode component
  misc_feature (33)..(34): n is a, c, g, or t
  misc_feature (43)..(44): n is a, c, g, or t
  misc_feature (53)..(54): n is a, c, g, or t
tttttttaagcagtggtatcaacgcagagtacnnttcaggagnntggcagtanntttttttttttttttttttttttttttttt

SEQ ID NO: 5296 - DNA, 84 bp, Artificial
  Barcode component
  misc_feature (33)..(34): n is a, c, g, or t
  misc_feature (43)..(44): n is a, c, g, or t
  misc_feature (53)..(54): n is a, c, g, or t
tttttttaagcagtggtatcaacgcagagtacnnttcaggagnncggtagttnntttttttttttttttttttttttttttttt

SEQ ID NO: 5297 - DNA, 84 bp, Artificial
  Barcode component
  misc_feature (33)..(34): n is a, c, g, or t
  misc_feature (43)..(44): n is a, c, g, or t
  misc_feature (53)..(54): n is a, c, g, or t
tttttttaagcagtggtatcaacgcagagtacnnttcaggagnntgacttcgnntttttttttttttttttttttttttttttt

SEQ ID NO: 5298 - DNA, 84 bp, Artificial
  Barcode component
  misc_feature (33)..(34): n is a, c, g, or t
  misc_feature (43)..(44): n is a, c, g, or t
  misc_feature (53)..(54): n is a, c, g, or t
tttttttaagcagtggtatcaacgcagagtacnnttcaggagnngagtgcaanntttttttttttttttttttttttttttttt

SEQ ID NO: 5299 - DNA, 84 bp, Artificial
  Barcode component
  misc_feature (33)..(34): n is a, c, g, or t
  misc_feature (43)..(44): n is a, c, g, or t
  misc_feature (53)..(54): n is a, c, g, or t
tttttttaagcagtggtatcaacgcagagtacnnttcaggagnnacggtaacnntttttttttttttttttttttttttttttt

SEQ ID NO: 5300 - DNA, 84 bp, Artificial
  Barcode component
  misc_feature (33)..(34): n is a, c, g, or t
  misc_feature (43)..(44): n is a, c, g, or t
  misc_feature (53)..(54): n is a, c, g, or t
tttttttaagcagtggtatcaacgcagagtacnnttcaggagnnaagtggtgnntttttttttttttttttttttttttttttt

SEQ ID NO: 5301 - DNA, 84 bp, Artificial
  Barcode component
  misc_feature (33)..(34): n is a, c, g, or t
  misc_feature (43)..(44): n is a, c, g, or t
  misc_feature (53)..(54): n is a, c, g, or t
tttttttaagcagtggtatcaacgcagagtacnnttcaggagnnggagacaanntttttttttttttttttttttttttttttt

SEQ ID NO: 5302 - DNA, 84 bp, Artificial
  Barcode component
  misc_feature (33)..(34): n is a, c, g, or t
  misc_feature (43)..(44): n is a, c, g, or t
  misc_feature (53)..(54): n is a, c, g, or t
tttttttaagcagtggtatcaacgcagagtacnnttcaggagnntcaaggacnntttttttttttttttttttttttttttttt

SEQ ID NO: 5303 - DNA, 84 bp, Artificial
  Barcode component
  misc_feature (33)..(34): n is a, c, g, or t
  misc_feature (43)..(44): n is a, c, g, or t
  misc_feature (53)..(54): n is a, c, g, or t
tttttttaagcagtggtatcaacgcagagtacnnttcaggagnnaagagagcnntttttttttttttttttttttttttttttt

SEQ ID NO: 5304 - DNA, 84 bp, Artificial
  Barcode component
  misc_feature (33)..(34): n is a, c, g, or t
  misc_feature (43)..(44): n is a, c, g, or t
  misc_feature (53)..(54): n is a, c, g, or t
tttttttaagcagtggtatcaacgcagagtacnnttcaggagnncgagagatnntttttttttttttttttttttttttttttt

SEQ ID NO: 5305 - DNA, 84 bp, Artificial
  Barcode component
  misc_feature (33)..(34): n is a, c, g, or t
  misc_feature (43)..(44): n is a, c, g, or t
  misc_feature (53)..(54): n is a, c, g, or t
tttttttaagcagtggtatcaacgcagagtacnnttcaggagnnacagatggnntttttttttttttttttttttttttttttt

SEQ ID NO: 5306 - DNA, 84 bp, Artificial
  Barcode component
  misc_feature (33)..(34): n is a, c, g, or t
  misc_feature (43)..(44): n is a, c, g, or t
  misc_feature (53)..(54): n is a, c, g, or t
tttttttaagcagtggtatcaacgcagagtacnnttcaggagnnaggagtcanntttttttttttttttttttttttttttttt

SEQ ID NO: 5307 - DNA, 84 bp, Artificial
  Barcode component
  misc_feature (33)..(34): n is a, c, g, or t
  misc_feature (43)..(44): n is a, c, g, or t
  misc_feature (53)..(54): n is a, c, g, or t
tttttttaagcagtggtatcaacgcagagtacnnttcaggagnncgtgttacnntttttttttttttttttttttttttttttt

SEQ ID NO: 5308 - DNA, 84 bp, Artificial
  Barcode component
  misc_feature (33)..(34): n is a, c, g, or t
  misc_feature (43)..(44): n is a, c, g, or t
  misc_feature (53)..(54): n is a, c, g, or t
tttttttaagcagtggtatcaacgcagagtacnnttcaggagnntagtgtgcnntttttttttttttttttttttttttttttt

SEQ ID NO: 5309 - DNA, 84 bp, Artificial
  Barcode component
  misc_feature (33)..(34): n is a, c, g, or t
  misc_feature (43)..(44): n is a, c, g, or t
  misc_feature (53)..(54): n is a, c, g, or t
tttttttaagcagtggtatcaacgcagagtacnnttcaggagnnctcatgacnntttttttttttttttttttttttttttttt

SEQ ID NO: 5310 - DNA, 84 bp, Artificial
  Barcode component
  misc_feature (33)..(34): n is a, c, g, or t
  misc_feature (43)..(44): n is a, c, g, or t
  misc_feature (53)..(54): n is a, c, g, or t
tttttttaagcagtggtatcaacgcagagtacnnttcaggagnngtatccagnntttttttttttttttttttttttttttttt

SEQ ID NO: 5311 - DNA, 84 bp, Artificial
  Barcode component
  misc_feature (33)..(34): n is a, c, g, or t
  misc_feature (43)..(44): n is a, c, g, or t
  misc_feature (53)..(54): n is a, c, g, or t
tttttttaagcagtggtatcaacgcagagtacnnttcaggagnnacgcctatnntttttttttttttttttttttttttttttt

SEQ ID NO: 5312 - DNA, 84 bp, Artificial
  Barcode component
  misc_feature (33)..(34): n is a, c, g, or t
  misc_feature (43)..(44): n is a, c, g, or t
  misc_feature (53)..(54): n is a, c, g, or t
tttttttaagcagtggtatcaacgcagagtacnnttcaggagnnaacgacctnntttttttttttttttttttttttttttttt

SEQ ID NO: 5313 - DNA, 84 bp, Artificial
  Barcode component
  misc_feature (33)..(34): n is a, c, g, or t
  misc_feature (43)..(44): n is a, c, g, or t
  misc_feature (53)..(54): n is a, c, g, or t
tttttttaagcagtggtatcaacgcagagtacnnttcaggagnnatcaggctnntttttttttttttttttttttttttttttt

SEQ ID NO: 5314 - DNA, 84 bp, Artificial
  Barcode component
  misc_feature (33)..(34): n is a, c, g, or t
  misc_feature (43)..(44): n is a, c, g, or t
  misc_feature (53)..(54): n is a, c, g, or t
tttttttaagcagtggtatcaacgcagagtacnnttcaggagnncaagttcgnntttttttttttttttttttttttttttttt

SEQ ID NO: 5315 - DNA, 84 bp, Artificial
  Barcode component
  misc_feature (33)..(34): n is a, c, g, or t
  misc_feature (43)..(44): n is a, c, g, or t
  misc_feature (53)..(54): n is a, c, g, or t
tttttttaagcagtggtatcaacgcagagtacnnttcaggagnntagccaganntttttttttttttttttttttttttttttt

SEQ ID NO: 5316 - DNA, 84 bp, Artificial
  Barcode component
  misc_feature (33)..(34): n is a, c, g, or t
  misc_feature (43)..(44): n is a, c, g, or t
  misc_feature (53)..(54): n is a, c, g, or t
tttttttaagcagtggtatcaacgcagagtacnnttcaggagnncaatcacgnntttttttttttttttttttttttttttttt

SEQ ID NO: 5317 - DNA, 84 bp, Artificial
  Barcode component
  misc_feature (33)..(34): n is a, c, g, or t
  misc_feature (43)..(44): n is a, c, g, or t
  misc_feature (53)..(54): n is a, c, g, or t
tttttttaagcagtggtatcaacgcagagtacnnttcaggagnngcaacaagnntttttttttttttttttttttttttttttt

SEQ ID NO: 5318 - DNA, 84 bp, Artificial
  Barcode component
  misc_feature (33)..(34): n is a, c, g, or t
  misc_feature (43)..(44): n is a, c, g, or t
  misc_feature (53)..(54): n is a, c, g, or t
tttttttaagcagtggtatcaacgcagagtacnnttcaggagnncacgacaanntttttttttttttttttttttttttttttt

SEQ ID NO: 5319 - DNA, 84 bp, Artificial
  Barcode component
  misc_feature (33)..(34): n is a, c, g, or t
  misc_feature (43)..(44): n is a, c, g, or t
  misc_feature (53)..(54): n is a, c, g, or t
tttttttaagcagtggtatcaacgcagagtacnnttcaggagnntacggaganntttttttttttttttttttttttttttttt

SEQ ID NO: 5320 - DNA, 84 bp, Artificial
  Barcode component
  misc_feature (33)..(34): n is a, c, g, or t
  misc_feature (43)..(44): n is a, c, g, or t
  misc_feature (53)..(54): n is a, c, g, or t
tttttttaagcagtggtatcaacgcagagtacnnttcaggagnncgacaaganntttttttttttttttttttttttttttttt

SEQ ID NO: 5321 - DNA, 84 bp, Artificial
  Barcode component
  misc_feature (33)..(34): n is a, c, g, or t
  misc_feature (43)..(44): n is a, c, g, or t
  misc_feature (53)..(54): n is a, c, g, or t
tttttttaagcagtggtatcaacgcagagtacnnttcaggagnncgaagtganntttttttttttttttttttttttttttttt

SEQ ID NO: 5322 - DNA, 84 bp, Artificial
  Barcode component
  misc_feature (33)..(34): n is a, c, g, or t
  misc_feature (43)..(44): n is a, c, g, or t
  misc_feature (53)..(54): n is a, c, g, or t
tttttttaagcagtggtatcaacgcagagtacnnttcaggagnnagctggtanntttttttttttttttttttttttttttttt

SEQ ID NO: 5323 - DNA, 84 bp, Artificial
  Barcode component
  misc_feature (33)..(34): n is a, c, g, or t
  misc_feature (43)..(44): n is a, c, g, or t
  misc_feature (53)..(54): n is a, c, g, or t
tttttttaagcagtggtatcaacgcagagtacnnttcaggagnnaactaggcnntttttttttttttttttttttttttttttt

SEQ ID NO: 5324 - DNA, 84 bp, Artificial
  Barcode component
  misc_feature (33)..(34): n is a, c, g, or t
  misc_feature (43)..(44): n is a, c, g, or t
  misc_feature (53)..(54): n is a, c, g, or t
tttttttaagcagtggtatcaacgcagagtacnnttcaggagnncagcaagtnntttttttttttttttttttttttttttttt

SEQ ID NO: 5325 - DNA, 84 bp, Artificial
  Barcode component
  misc_feature (33)..(34): n is a, c, g, or t
  misc_feature (43)..(44): n is a, c, g, or t
  misc_feature (53)..(54): n is a, c, g, or t
tttttttaagcagtggtatcaacgcagagtacnnttcaggagnnacgaggtanntttttttttttttttttttttttttttttt

SEQ ID NO: 5326 - DNA, 84 bp, Artificial
  Barcode component
  misc_feature (33)..(34): n is a, c, g, or t
  misc_feature (43)..(44): n is a, c, g, or t
  misc_feature (53)..(54): n is a, c, g, or t
tttttttaagcagtggtatcaacgcagagtacnnttcaggagnncatcttccnntttttttttttttttttttttttttttttt

SEQ ID NO: 5327 - DNA, 84 bp, Artificial
  Barcode component
  misc_feature (33)..(34): n is a, c, g, or t
  misc_feature (43)..(44): n is a, c, g, or t
  misc_feature (53)..(54): n is a, c, g, or t
tttttttaagcagtggtatcaacgcagagtacnnttcaggagnncctgaatcnntttttttttttttttttttttttttttttt

SEQ ID NO: 5328 - DNA, 84 bp, Artificial
  Barcode component
  misc_feature (33)..(34): n is a, c, g, or t
  misc_feature (43)..(44): n is a, c, g, or t
  misc_feature (53)..(54): n is a, c, g, or t
tttttttaagcagtggtatcaacgcagagtacnnttcaggagnntgcagactnntttttttttttttttttttttttttttttt

SEQ ID NO: 5329 - DNA, 84 bp, Artificial
  Barcode component
  misc_feature (33)..(34): n is a, c, g, or t
  misc_feature (43)..(44): n is a, c, g, or t
  misc_feature (53)..(54): n is a, c, g, or t
tttttttaagcagtggtatcaacgcagagtacnnttcaggagnnagatgtggnntttttttttttttttttttttttttttttt

SEQ ID NO: 5330 - DNA, 84 bp, Artificial
  Barcode component
  misc_feature (33)..(34): n is a, c, g, or t
  misc_feature (43)..(44): n is a, c, g, or t
  misc_feature (53)..(54): n is a, c, g, or t
tttttttaagcagtggtatcaacgcagagtacnnttcaggagnnagttcgacnntttttttttttttttttttttttttttttt

SEQ ID NO: 5331 - DNA, 84 bp, Artificial
  Barcode component
  misc_feature (33)..(34): n is a, c, g, or t
  misc_feature (43)..(44): n is a, c, g, or t
  misc_feature (53)..(54): n is a, c, g, or t
tttttttaagcagtggtatcaacgcagagtacnnttcaggagnnacaacctcnntttttttttttttttttttttttttttttt

SEQ ID NO: 5332 - DNA, 84 bp, Artificial
  Barcode component
  misc_feature (33)..(34): n is a, c, g, or t
  misc_feature (43)..(44): n is a, c, g, or t
  misc_feature (53)..(54): n is a, c, g, or t
tttttttaagcagtggtatcaacgcagagtacnnttcaggagnncatggtagnntttttttttttttttttttttttttttttt

SEQ ID NO: 5333 - DNA, 84 bp, Artificial
  Barcode component
  misc_feature (33)..(34): n is a, c, g, or t
  misc_feature (43)..(44): n is a, c, g, or t
  misc_feature (53)..(54): n is a, c, g, or t
tttttttaagcagtggtatcaacgcagagtacnnttcaggagnncgtatctcnntttttttttttttttttttttttttttttt

SEQ ID NO: 5334 - DNA, 84 bp, Artificial
  Barcode component
  misc_feature (33)..(34): n is a, c, g, or t
  misc_feature (43)..(44): n is a, c, g, or t
  misc_feature (53)..(54): n is a, c, g, or t
tttttttaagcagtggtatcaacgcagagtacnnttcaggagnncctagttcnntttttttttttttttttttttttttttttt

SEQ ID NO: 5335 - DNA, 84 bp, Artificial
  Barcode component
  misc_feature (33)..(34): n is a, c, g, or t
  misc_feature (43)..(44): n is a, c, g, or t
  misc_feature (53)..(54): n is a, c, g, or t
tttttttaagcagtggtatcaacgcagagtacnnttcaggagnncaagagtcnntttttttttttttttttttttttttttttt

SEQ ID NO: 5336 - DNA, 84 bp, Artificial
  Barcode component
  misc_feature (33)..(34): n is a, c, g, or t
  misc_feature (43)..(44): n is a, c, g, or t
  misc_feature (53)..(54): n is a, c, g, or t
tttttttaagcagtggtatcaacgcagagtacnngtcataggnnaatcggcanntttttttttttttttttttttttttttttt

SEQ ID NO: 5337 - DNA, 84 bp, Artificial
  Barcode component
  misc_feature (33)..(34): n is a, c, g, or t
  misc_feature (43)..(44): n is a, c, g, or t
  misc_feature (53)..(54): n is a, c, g, or t
tttttttaagcagtggtatcaacgcagagtacnngtcataggnntacggcatnntttttttttttttttttttttttttttttt

SEQ ID NO: 5338 - DNA, 84 bp, Artificial
  Barcode component
  misc_feature (33)..(34): n is a, c, g, or t
  misc_feature (43)..(44): n is a, c, g, or t
  misc_feature (53)..(54): n is a, c, g, or t
tttttttaagcagtggtatcaacgcagagtacnngtcataggnnttggatcgnntttttttttttttttttttttttttttttt

SEQ ID NO: 5339 - DNA, 84 bp, Artificial
  Barcode component
  misc_feature (33)..(34): n is a, c, g, or t
  misc_feature (43)..(44): n is a, c, g, or t
  misc_feature (53)..(54): n is a, c, g, or t
tttttttaagcagtggtatcaacgcagagtacnngtcataggnntggaacganntttttttttttttttttttttttttttttt

SEQ ID NO: 5340 - DNA, 84 bp, Artificial
  Barcode component
  misc_feature (33)..(34): n is a, c, g, or t
  misc_feature (43)..(44): n is a, c, g, or t
  misc_feature (53)..(54): n is a, c, g, or t
tttttttaagcagtggtatcaacgcagagtacnngtcataggnnggcaatcanntttttttttttttttttttttttttttttt

SEQ ID NO: 5341 - DNA, 84 bp, Artificial
  Barcode component
  misc_feature (33)..(34): n is a, c, g, or t
  misc_feature (43)..(44): n is a, c, g, or t
  misc_feature (53)..(54): n is a, c, g, or t
tttttttaagcagtggtatcaacgcagagtacnngtcataggnngaatccganntttttttttttttttttttttttttttttt

SEQ ID NO: 5342 - DNA, 84 bp, Artificial
  Barcode component
  misc_feature (33)..(34): n is a, c, g, or t
  misc_feature (43)..(44): n is a, c, g, or t
  misc_feature (53)..(54): n is a, c, g, or t
tttttttaagcagtggtatcaacgcagagtacnngtcataggnnttacggtgnntttttttttttttttttttttttttttttt

SEQ ID NO: 5343 - DNA, 84 bp, Artificial
  Barcode component
  misc_feature (33)..(34): n is a, c, g, or t
  misc_feature (43)..(44): n is a, c, g, or t
  misc_feature (53)..(54): n is a, c, g, or t
tttttttaagcagtggtatcaacgcagagtacnngtcataggnncatatcggnntttttttttttttttttttttttttttttt

SEQ ID NO: 5344 - DNA, 84 bp, Artificial
  Barcode component
  misc_feature (33)..(34): n is a, c, g, or t
  misc_feature (43)..(44): n is a, c, g, or t
  misc_feature (53)..(54): n is a, c, g, or t
tttttttaagcagtggtatcaacgcagagtacnngtcataggnncttcggtanntttttttttttttttttttttttttttttt

SEQ ID NO: 5345 - DNA, 84 bp, Artificial
  Barcode component
  misc_feature (33)..(34): n is a, c, g, or t
  misc_feature (43)..(44): n is a, c, g, or t
  misc_feature (53)..(54): n is a, c, g, or t
tttttttaagcagtggtatcaacgcagagtacnngtcataggnntcctaacgnntttttttttttttttttttttttttttttt

SEQ ID NO: 5346 - DNA, 84 bp, Artificial
  Barcode component
  misc_feature (33)..(34): n is a, c, g, or t
  misc_feature (43)..(44): n is a, c, g, or t
  misc_feature (53)..(54): n is a, c, g, or t
tttttttaagcagtggtatcaacgcagagtacnngtcataggnngtaagccanntttttttttttttttttttttttttttttt

SEQ ID NO: 5347 - DNA, 84 bp, Artificial
  Barcode component
  misc_feature (33)..(34): n is a, c, g, or t
  misc_feature (43)..(44): n is a, c, g, or t
  misc_feature (53)..(54): n is a, c, g, or t
tttttttaagcagtggtatcaacgcagagtacnngtcataggnntaaggtggnntttttttttttttttttttttttttttttt

SEQ ID NO: 5348 - DNA, 84 bp, Artificial
  Barcode component
  misc_feature (33)..(34): n is a, c, g, or t
  misc_feature (43)..(44): n is a, c, g, or t
  misc_feature (53)..(54): n is a, c, g, or t
tttttttaagcagtggtatcaacgcagagtacnngtcataggnnggtaagctnntttttttttttttttttttttttttttttt

SEQ ID NO: 5349 - DNA, 84 bp, Artificial
  Barcode component
  misc_feature (33)..(34): n is a, c, g, or t
  misc_feature (43)..(44): n is a, c, g, or t
  misc_feature (53)..(54): n is a, c, g, or t
tttttttaagcagtggtatcaacgcagagtacnngtcataggnntgtgtcganntttttttttttttttttttttttttttttt

SEQ ID NO: 5350 - DNA, 84 bp, Artificial
  Barcode component
  misc_feature (33)..(34): n is a, c, g, or t
  misc_feature (43)..(44): n is a, c, g, or t
  misc_feature (53)..(54): n is a, c, g, or t
tttttttaagcagtggtatcaacgcagagtacnngtcataggnngagcatganntttttttttttttttttttttttttttttt

SEQ ID NO: 5351 - DNA, 84 bp, Artificial
  Barcode component
  misc_feature (33)..(34): n is a, c, g, or t
  misc_feature (43)..(44): n is a, c, g, or t
  misc_feature (53)..(54): n is a, c, g, or t
tttttttaagcagtggtatcaacgcagagtacnngtcataggnntcgaagtcnntttttttttttttttttttttttttttttt

SEQ ID NO: 5352 - DNA, 84 bp, Artificial
  Barcode component
  misc_feature (33)..(34): n is a, c, g, or t
  misc_feature (43)..(44): n is a, c, g, or t
  misc_feature (53)..(54): n is a, c, g, or t
tttttttaagcagtggtatcaacgcagagtacnngtcataggnnggtgaacanntttttttttttttttttttttttttttttt

SEQ ID NO: 5353 - DNA, 84 bp, Artificial
  Barcode component
  misc_feature (33)..(34): n is a, c, g, or t
  misc_feature (43)..(44): n is a, c, g, or t
  misc_feature (53)..(54): n is a, c, g, or t
tttttttaagcagtggtatcaacgcagagtacnngtcataggnnacatgcacnntttttttttttttttttttttttttttttt

SEQ ID NO: 5354 - DNA, 84 bp, Artificial
  Barcode component
  misc_feature (33)..(34): n is a, c, g, or t
  misc_feature (43)..(44): n is a, c, g, or t
  misc_feature (53)..(54): n is a, c, g, or t
tttttttaagcagtggtatcaacgcagagtacnngtcataggnnccaacagtnntttttttttttttttttttttttttttttt

SEQ ID NO: 5355 - DNA, 84 bp, Artificial
  Barcode component
  misc_feature (33)..(34): n is a, c, g, or t
  misc_feature (43)..(44): n is a, c, g, or t
  misc_feature (53)..(54): n is a, c, g, or t
tttttttaagcagtggtatcaacgcagagtacnngtcataggnnagaacagcnntttttttttttttttttttttttttttttt

SEQ ID NO: 5356 - DNA, 84 bp, Artificial
  Barcode component
  misc_feature (33)..(34): n is a, c, g, or t
  misc_feature (43)..(44): n is a, c, g, or t
  misc_feature (53)..(54): n is a, c, g, or t
tttttttaagcagtggtatcaacgcagagtacnngtcataggnngaacacgtnntttttttttttttttttttttttttttttt

SEQ ID NO: 5357 - DNA, 84 bp, Artificial
  Barcode component
  misc_feature (33)..(34): n is a, c, g, or t
  misc_feature (43)..(44): n is a, c, g, or t
  misc_feature (53)..(54): n is a, c, g, or t
tttttttaagcagtggtatcaacgcagagtacnngtcataggnnggtcttcanntttttttttttttttttttttttttttttt

SEQ ID NO: 5358 - DNA, 84 bp, Artificial
  Barcode component
  misc_feature (33)..(34): n is a, c, g, or t
  misc_feature (43)..(44): n is a, c, g, or t
  misc_feature (53)..(54): n is a, c, g, or t
tttttttaagcagtggtatcaacgcagagtacnngtcataggnnaggttcagnntttttttttttttttttttttttttttttt

SEQ ID NO: 5359 - DNA, 84 bp, Artificial
  Barcode component
  misc_feature (33)..(34): n is a, c, g, or t
  misc_feature (43)..(44): n is a, c, g, or t
  misc_feature (53)..(54): n is a, c, g, or t
tttttttaagcagtggtatcaacgcagagtacnngtcataggnnctagagcanntttttttttttttttttttttttttttttt

SEQ ID NO: 5360 - DNA, 84 bp, Artificial
  Barcode component
  misc_feature (33)..(34): n is a, c, g, or t
  misc_feature (43)..(44): n is a, c, g, or t
  misc_feature (53)..(54): n is a, c, g, or t
tttttttaagcagtggtatcaacgcagagtacnngtcataggnncttctagcnntttttttttttttttttttttttttttttt

SEQ ID NO: 5361 - DNA, 84 bp, Artificial
  Barcode component
  misc_feature (33)..(34): n is a, c, g, or t
  misc_feature (43)..(44): n is a, c, g, or t
  misc_feature (53)..(54): n is a, c, g, or t
tttttttaagcagtggtatcaacgcagagtacnngtcataggnngagtaacgnntttttttttttttttttttttttttttttt

SEQ ID NO: 5362 - DNA, 84 bp, Artificial
  Barcode component
  misc_feature (33)..(34): n is a, c, g, or t
  misc_feature (43)..(44): n is a, c, g, or t
  misc_feature (53)..(54): n is a, c, g, or t
tttttttaagcagtggtatcaacgcagagtacnngtcataggnnctaagaggnntttttttttttttttttttttttttttttt

SEQ ID NO: 5363 - DNA, 84 bp, Artificial
  Barcode component
  misc_feature (33)..(34): n is a, c, g, or t
  misc_feature (43)..(44): n is a, c, g, or t
  misc_feature (53)..(54): n is a, c, g, or t
tttttttaagcagtggtatcaacgcagagtacnngtcataggnnacgtgtagnntttttttttttttttttttttttttttttt

SEQ ID NO: 5364 - DNA, 84 bp, Artificial
  Barcode component
  misc_feature (33)..(34): n is a, c, g, or t
  misc_feature (43)..(44): n is a, c, g, or t
  misc_feature (53)..(54): n is a, c, g, or t
tttttttaagcagtggtatcaacgcagagtacnngtcataggnnactacaggnntttttttttttttttttttttttttttttt

SEQ ID NO: 5365 - DNA, 84 bp, Artificial
  Barcode component
  misc_feature (33)..(34): n is a, c, g, or t
  misc_feature (43)..(44): n is a, c, g, or t
  misc_feature (53)..(54): n is a, c, g, or t
tttttttaagcagtggtatcaacgcagagtacnngtcataggnntacaggtcnntttttttttttttttttttttttttttttt

SEQ ID NO: 5366 - DNA, 84 bp, Artificial
  Barcode component
  misc_feature (33)..(34): n is a, c, g, or t
  misc_feature (43)..(44): n is a, c, g, or t
  misc_feature (53)..(54): n is a, c, g, or t
tttttttaagcagtggtatcaacgcagagtacnngtcataggnnctcacatgnntttttttttttttttttttttttttttttt

SEQ ID NO: 5367 - DNA, 84 bp, Artificial
  Barcode component
  misc_feature (33)..(34): n is a, c, g, or t
  misc_feature (43)..(44): n is a, c, g, or t
  misc_feature (53)..(54): n is a, c, g, or t
tttttttaagcagtggtatcaacgcagagtacnngtcataggnnactaggagnntttttttttttttttttttttttttttttt

SEQ ID NO: 5368 - DNA, 84 bp, Artificial
  Barcode component
  misc_feature (33)..(34): n is a, c, g, or t
  misc_feature (43)..(44): n is a, c, g, or t
  misc_feature (53)..(54): n is a, c, g, or t
tttttttaagcagtggtatcaacgcagagtacnngtcataggnnccatagganntttttttttttttttttttttttttttttt

SEQ ID NO: 5369 - DNA, 84 bp, Artificial
  Barcode component
  misc_feature (33)..(34): n is a, c, g, or t
  misc_feature (43)..(44): n is a, c, g, or t
  misc_feature (53)..(54): n is a, c, g, or t
tttttttaagcagtggtatcaacgcagagtacnngtcataggnnggagaatcnntttttttttttttttttttttttttttttt

SEQ ID NO: 5370 - DNA, 84 bp, Artificial
  Barcode component
  misc_feature (33)..(34): n is a, c, g, or t
  misc_feature (43)..(44): n is a, c, g, or t
  misc_feature (53)..(54): n is a, c, g, or t
tttttttaagcagtggtatcaacgcagagtacnngtcataggnngccaagaanntttttttttttttttttttttttttttttt

SEQ ID NO: 5371 - DNA, 84 bp, Artificial
  Barcode component
  misc_feature (33)..(34): n is a, c, g, or t
  misc_feature (43)..(44): n is a, c, g, or t
  misc_feature (53)..(54): n is a, c, g, or t
tttttttaagcagtggtatcaacgcagagtacnngtcataggnnaaggcaagnntttttttttttttttttttttttttttttt

SEQ ID NO: 5372 - DNA, 84 bp, Artificial
  Barcode component
  misc_feature (33)..(34): n is a, c, g, or t
  misc_feature (43)..(44): n is a, c, g, or t
  misc_feature (53)..(54): n is a, c, g, or t
tttttttaagcagtggtatcaacgcagagtacnngtcataggnnaatgtcgcnntttttttttttttttttttttttttttttt

SEQ ID NO: 5373 - DNA, 84 bp, Artificial
  Barcode component
  misc_feature (33)..(34): n is a, c, g, or t
  misc_feature (43)..(44): n is a, c, g, or t
  misc_feature (53)..(54): n is a, c, g, or t
tttttttaagcagtggtatcaacgcagagtacnngtcataggnnatggaaccnntttttttttttttttttttttttttttttt

SEQ ID NO: 5374 - DNA, 84 bp, Artificial
  Barcode component
  misc_feature (33)..(34): n is a, c, g, or t
  misc_feature (43)..(44): n is a, c, g, or t
  misc_feature (53)..(54): n is a, c, g, or t
tttttttaagcagtggtatcaacgcagagtacnngtcataggnnagaggcatnntttttttttttttttttttttttttttttt

SEQ ID NO: 5375 - DNA, 84 bp, Artificial
  Barcode component
  misc_feature (33)..(34): n is a, c, g, or t
  misc_feature (43)..(44): n is a, c, g, or t
  misc_feature (53)..(54): n is a, c, g, or t
tttttttaagcagtggtatcaacgcagagtacnngtcataggnntgcatagcnntttttttttttttttttttttttttttttt

SEQ ID NO: 5376 - DNA, 84 bp, Artificial
  Barcode component
  misc_feature (33)..(34): n is a, c, g, or t
  misc_feature (43)..(44): n is a, c, g, or t
  misc_feature (53)..(54): n is a, c, g, or t
tttttttaagcagtggtatcaacgcagagtacnngtcataggnnctaacgganntttttttttttttttttttttttttttttt

SEQ ID NO: 5377 - DNA, 84 bp, Artificial
  Barcode component
  misc_feature (33)..(34): n is a, c, g, or t
  misc_feature (43)..(44): n is a, c, g, or t
  misc_feature (53)..(54): n is a, c, g, or t
tttttttaagcagtggtatcaacgcagagtacnngtcataggnntatcgaggnntttttttttttttttttttttttttttttt

SEQ ID NO: 5378 - DNA, 84 bp, Artificial
  Barcode component
  misc_feature (33)..(34): n is a, c, g, or t
  misc_feature (43)..(44): n is a, c, g, or t
  misc_feature (53)..(54): n is a, c, g, or t
tttttttaagcagtggtatcaacgcagagtacnngtcataggnncatagcctnntttttttttttttttttttttttttttttt

SEQ ID NO: 5379 - DNA, 84 bp, Artificial
  Barcode component
  misc_feature (33)..(34): n is a, c, g, or t
  misc_feature (43)..(44): n is a, c, g, or t
  misc_feature (53)..(54): n is a, c, g, or t
tttttttaagcagtggtatcaacgcagagtacnngtcataggnnatcgagacnntttttttttttttttttttttttttttttt

SEQ ID NO: 5380 - DNA, 84 bp, Artificial
  Barcode component
  misc_feature (33)..(34): n is a, c, g, or t
  misc_feature (43)..(44): n is a, c, g, or t
  misc_feature (53)..(54): n is a, c, g, or t
tttttttaagcagtggtatcaacgcagagtacnngtcataggnnggaagagtnntttttttttttttttttttttttttttttt

SEQ ID NO: 5381 - DNA, 84 bp, Artificial
  Barcode component
  misc_feature (33)..(34): n is a, c, g, or t
  misc_feature (43)..(44): n is a, c, g, or t
  misc_feature (53)..(54): n is a, c, g, or t
tttttttaagcagtggtatcaacgcagagtacnngtcataggnnccaagtagnntttttttttttttttttttttttttttttt

SEQ ID NO: 5382 - DNA, 84 bp, Artificial
  Barcode component
  misc_feature (33)..(34): n is a, c, g, or t
  misc_feature (43)..(44): n is a, c, g, or t
  misc_feature (53)..(54): n is a, c, g, or t
tttttttaagcagtggtatcaacgcagagtacnngtcataggnnctgaacagnntttttttttttttttttttttttttttttt

SEQ ID NO: 5383 - DNA, 84 bp, Artificial
  Barcode component
  misc_feature (33)..(34): n is a, c, g, or t
  misc_feature (43)..(44): n is a, c, g, or t
  misc_feature (53)..(54): n is a, c, g, or t
tttttttaagcagtggtatcaacgcagagtacnngtcataggnngtaggttcnntttttttttttttttttttttttttttttt

SEQ ID NO: 5384 - DNA, 84 bp, Artificial
  Barcode component
  misc_feature (33)..(34): n is a, c, g, or t
  misc_feature (43)..(44): n is a, c, g, or t
  misc_feature (53)..(54): n is a, c, g, or t
tttttttaagcagtggtatcaacgcagagtacnngtcataggnngtatggacnntttttttttttttttttttttttttttttt

SEQ ID NO: 5385 - DNA, 84 bp, Artificial
  Barcode component
  misc_feature (33)..(34): n is a, c, g, or t
  misc_feature (43)..(44): n is a, c, g, or t
  misc_feature (53)..(54): n is a, c, g, or t
tttttttaagcagtggtatcaacgcagagtacnngtcataggnntcgcaacanntttttttttttttttttttttttttttttt

SEQ ID NO: 5386 - DNA, 84 bp, Artificial
  Barcode component
  misc_feature (33)..(34): n is a, c, g, or t
  misc_feature (43)..(44): n is a, c, g, or t
  misc_feature (53)..(54): n is a, c, g, or t
tttttttaagcagtggtatcaacgcagagtacnngtcataggnnccgctaatnntttttttttttttttttttttttttttttt

SEQ ID NO: 5387 - DNA, 84 bp, Artificial
  Barcode component
  misc_feature (33)..(34): n is a, c, g, or t
  misc_feature (43)..(44): n is a, c, g, or t
  misc_feature (53)..(54): n is a, c, g, or t
tttttttaagcagtggtatcaacgcagagtacnngtcataggnngattcgcanntttttttttttttttttttttttttttttt

SEQ ID NO: 5388 - DNA, 84 bp, Artificial
  Barcode component
  misc_feature (33)..(34): n is a, c, g, or t
  misc_feature (43)..(44): n is a, c, g, or t
  misc_feature (53)..(54): n is a, c, g, or t
tttttttaagcagtggtatcaacgcagagtacnngtcataggnncgatggaanntttttttttttttttttttttttttttttt

SEQ ID NO: 5389 - DNA, 84 bp, Artificial
  Barcode component
  misc_feature (33)..(34): n is a, c, g, or t
  misc_feature (43)..(44): n is a, c, g, or t
  misc_feature (53)..(54): n is a, c, g, or t
tttttttaagcagtggtatcaacgcagagtacnngtcataggnnagcaagganntttttttttttttttttttttttttttttt

SEQ ID NO: 5390 - DNA, 84 bp, Artificial
  Barcode component
  misc_feature (33)..(34): n is a, c, g, or t
  misc_feature (43)..(44): n is a, c, g, or t
  misc_feature (53)..(54): n is a, c, g, or t
tttttttaagcagtggtatcaacgcagagtacnngtcataggnncgtagcaanntttttttttttttttttttttttttttttt

SEQ ID NO: 5391 - DNA, 84 bp, Artificial
  Barcode component
  misc_feature (33)..(34): n is a, c, g, or t
  misc_feature (43)..(44): n is a, c, g, or t
  misc_feature (53)..(54): n is a, c, g, or t
tttttttaagcagtggtatcaacgcagagtacnngtcataggnntggcagtanntttttttttttttttttttttttttttttt

SEQ ID NO: 5392 - DNA, 84 bp, Artificial
  Barcode component
  misc_feature (33)..(34): n is a, c, g, or t
  misc_feature (43)..(44): n is a, c, g, or t
  misc_feature (53)..(54): n is a, c, g, or t
tttttttaagcagtggtatcaacgcagagtacnngtcataggnncggtagttnntttttttttttttttttttttttttttttt

SEQ ID NO: 5393 - DNA, 84 bp, Artificial
  Barcode component
  misc_feature (33)..(34): n is a, c, g, or t
  misc_feature (43)..(44): n is a, c, g, or t
  misc_feature (53)..(54): n is a, c, g, or t
tttttttaagcagtggtatcaacgcagagtacnngtcataggnntgacttcgnntttttttttttttttttttttttttttttt

SEQ ID NO: 5394 - DNA, 84 bp, Artificial
  Barcode component
  misc_feature (33)..(34): n is a, c, g, or t
  misc_feature (43)..(44): n is a, c, g, or t
  misc_feature (53)..(54): n is a, c, g, or t
tttttttaagcagtggtatcaacgcagagtacnngtcataggnngagtgcaanntttttttttttttttttttttttttttttt

SEQ ID NO: 5395 - DNA, 84 bp, Artificial
  Barcode component
  misc_feature (33)..(34): n is a, c, g, or t
  misc_feature (43)..(44): n is a, c, g, or t
  misc_feature (53)..(54): n is a, c, g, or t
tttttttaagcagtggtatcaacgcagagtacnngtcataggnnacggtaacnntttttttttttttttttttttttttttttt

SEQ ID NO: 5396 - DNA, 84 bp, Artificial
  Barcode component
  misc_feature (33)..(34): n is a, c, g, or t
  misc_feature (43)..(44): n is a, c, g, or t
  misc_feature (53)..(54): n is a, c, g, or t
tttttttaagcagtggtatcaacgcagagtacnngtcataggnnaagtggtgnntttttttttttttttttttttttttttttt

SEQ ID NO: 5397 - DNA, 84 bp, Artificial
  Barcode component
  misc_feature (33)..(34): n is a, c, g, or t
  misc_feature (43)..(44): n is a, c, g, or t
  misc_feature (53)..(54): n is a, c, g, or t
tttttttaagcagtggtatcaacgcagagtacnngtcataggnnggagacaanntttttttttttttttttttttttttttttt

SEQ ID NO: 5398 - DNA, 84 bp, Artificial
  Barcode component
  misc_feature (33)..(34): n is a, c, g, or t
  misc_feature (43)..(44): n is a, c, g, or t
  misc_feature (53)..(54): n is a, c, g, or t
tttttttaagcagtggtatcaacgcagagtacnngtcataggnntcaaggacnntttttttttttttttttttttttttttttt

SEQ ID NO: 5399 - DNA, 84 bp, Artificial
  Barcode component
  misc_feature (33)..(34): n is a, c, g, or t
  misc_feature (43)..(44): n is a, c, g, or t
  misc_feature (53)..(54): n is a, c, g, or t
tttttttaagcagtggtatcaacgcagagtacnngtcataggnnaagagagcnntttttttttttttttttttttttttttttt

SEQ ID NO: 5400 - DNA, 84 bp, Artificial
  Barcode component
  misc_feature (33)..(34): n is a, c, g, or t
  misc_feature (43)..(44): n is a, c, g, or t
  misc_feature (53)..(54): n is a, c, g, or t
tttttttaagcagtggtatcaacgcagagtacnngtcataggnncgagagatnntttttttttttttttttttttttttttttt

SEQ ID NO: 5401 - DNA, 84 bp, Artificial
  Barcode component
  misc_feature (33)..(34): n is a, c, g, or t
  misc_feature (43)..(44): n is a, c, g, or t
  misc_feature (53)..(54): n is a, c, g, or t
tttttttaagcagtggtatcaacgcagagtacnngtcataggnnacagatggnntttttttttttttttttttttttttttttt

SEQ ID NO: 5402 - DNA, 84 bp, Artificial
  Barcode component
  misc_feature (33)..(34): n is a, c, g, or t
  misc_feature (43)..(44): n is a, c, g, or t
  misc_feature (53)..(54): n is a, c, g, or t
tttttttaagcagtggtatcaacgcagagtacnngtcataggnnaggagtcanntttttttttttttttttttttttttttttt

SEQ ID NO: 5403 - DNA, 84 bp, Artificial
  Barcode component
  misc_feature (33)..(34): n is a, c, g, or t
  misc_feature (43)..(44): n is a, c, g, or t
  misc_feature (53)..(54): n is a, c, g, or t
tttttttaagcagtggtatcaacgcagagtacnngtcataggnncgtgttacnntttttttttttttttttttttttttttttt

SEQ ID NO: 5404 - DNA, 84 bp, Artificial
  Barcode component
  misc_feature (33)..(34): n is a, c, g, or t
  misc_feature (43)..(44): n is a, c, g, or t
  misc_feature (53)..(54): n is a, c, g, or t
tttttttaagcagtggtatcaacgcagagtacnngtcataggnntagtgtgcnntttttttttttttttttttttttttttttt

SEQ ID NO: 5405 - DNA, 84 bp, Artificial
  Barcode component
  misc_feature (33)..(34): n is a, c, g, or t
  misc_feature (43)..(44): n is a, c, g, or t
  misc_feature (53)..(54): n is a, c, g, or t
tttttttaagcagtggtatcaacgcagagtacnngtcataggnnctcatgacnntttttttttttttttttttttttttttttt

SEQ ID NO: 5406 - DNA, 84 bp, Artificial
  Barcode component
  misc_feature (33)..(34): n is a, c, g, or t
  misc_feature (43)..(44): n is a, c, g, or t
  misc_feature (53)..(54): n is a, c, g, or t
tttttttaagcagtggtatcaacgcagagtacnngtcataggnngtatccagnntttttttttttttttttttttttttttttt

SEQ ID NO: 5407 - DNA, 84 bp, Artificial
  Barcode component
  misc_feature (33)..(34): n is a, c, g, or t
  misc_feature (43)..(44): n is a, c, g, or t
  misc_feature (53)..(54): n is a, c, g, or t
tttttttaagcagtggtatcaacgcagagtacnngtcataggnnacgcctatnntttttttttttttttttttttttttttttt

SEQ ID NO: 5408 - DNA, 84 bp, Artificial
  Barcode component
  misc_feature (33)..(34): n is a, c, g, or t
  misc_feature (43)..(44): n is a, c, g, or t
  misc_feature (53)..(54): n is a, c, g, or t
tttttttaagcagtggtatcaacgcagagtacnngtcataggnnaacgacctnntttttttttttttttttttttttttttttt

SEQ ID NO: 5409 - DNA, 84 bp, Artificial
  Barcode component
  misc_feature (33)..(34): n is a, c, g, or t
  misc_feature (43)..(44): n is a, c, g, or t
  misc_feature (53)..(54): n is a, c, g, or t
tttttttaagcagtggtatcaacgcagagtacnngtcataggnnatcaggctnntttttttttttttttttttttttttttttt

SEQ ID NO: 5410 - DNA, 84 bp, Artificial
  Barcode component
  misc_feature (33)..(34): n is a, c, g, or t
  misc_feature (43)..(44): n is a, c, g, or t
  misc_feature (53)..(54): n is a, c, g, or t
tttttttaagcagtggtatcaacgcagagtacnngtcataggnncaagttcgnntttttttttttttttttttttttttttttt

SEQ ID NO: 5411 - DNA, 84 bp, Artificial
  Barcode component
  misc_feature (33)..(34): n is a, c, g, or t
  misc_feature (43)..(44): n is a, c, g, or t
  misc_feature (53)..(54): n is a, c, g, or t
tttttttaagcagtggtatcaacgcagagtacnngtcataggnntagccaganntttttttttttttttttttttttttttttt

SEQ ID NO: 5412 - DNA, 84 bp, Artificial
  Barcode component
  misc_feature (33)..(34): n is a, c, g, or t
  misc_feature (43)..(44): n is a, c, g, or t
  misc_feature (53)..(54): n is a, c, g, or t
tttttttaagcagtggtatcaacgcagagtacnngtcataggnncaatcacgnntttttttttttttttttttttttttttttt

SEQ ID NO: 5413 - DNA, 84 bp, Artificial
  Barcode component
  misc_feature (33)..(34): n is a, c, g, or t
  misc_feature (43)..(44): n is a, c, g, or t
  misc_feature (53)..(54): n is a, c, g, or t
tttttttaagcagtggtatcaacgcagagtacnngtcataggnngcaacaagnntttttttttttttttttttttttttttttt

SEQ ID NO: 5414 - DNA, 84 bp, Artificial
  Barcode component
  misc_feature (33)..(34): n is a, c, g, or t
  misc_feature (43)..(44): n is a, c, g, or t
  misc_feature (53)..(54): n is a, c, g, or t
tttttttaagcagtggtatcaacgcagagtacnngtcataggnncacgacaanntttttttttttttttttttttttttttttt

SEQ ID NO: 5415 - DNA, 84 bp, Artificial
  Barcode component
  misc_feature (33)..(34): n is a, c, g, or t
  misc_feature (43)..(44): n is a, c, g, or t
  misc_feature (53)..(54): n is a, c, g, or t
tttttttaagcagtggtatcaacgcagagtacnngtcataggnntacggaganntttttttttttttttttttttttttttttt

SEQ ID NO: 5416 - DNA, 84 bp, Artificial
  Barcode component
  misc_feature (33)..(34): n is a, c, g, or t
  misc_feature (43)..(44): n is a, c, g, or t
  misc_feature (53)..(54): n is a, c, g, or t
tttttttaagcagtggtatcaacgcagagtacnngtcataggnncgacaaganntttttttttttttttttttttttttttttt

SEQ ID NO: 5417 - DNA, 84 bp, Artificial
  Barcode component
  misc_feature (33)..(34): n is a, c, g, or t
  misc_feature (43)..(44): n is a, c, g, or t
  misc_feature (53)..(54): n is a, c, g, or t
tttttttaagcagtggtatcaacgcagagtacnngtcataggnncgaagtganntttttttttttttttttttttttttttttt

SEQ ID NO: 5418 - DNA, 84 bp, Artificial
  Barcode component
  misc_feature (33)..(34): n is a, c, g, or t
  misc_feature (43)..(44): n is a, c, g, or t
  misc_feature (53)..(54): n is a, c, g, or t
tttttttaagcagtggtatcaacgcagagtacnngtcataggnnagctggtanntttttttttttttttttttttttttttttt

SEQ ID NO: 5419 - DNA, 84 bp, Artificial
  Barcode component
  misc_feature (33)..(34): n is a, c, g, or t
  misc_feature (43)..(44): n is a, c, g, or t
  misc_feature (53)..(54): n is a, c, g, or t
tttttttaagcagtggtatcaacgcagagtacnngtcataggnnaactaggcnntttttttttttttttttttttttttttttt

SEQ ID NO: 5420 - DNA, 84 bp, Artificial
  Barcode component
  misc_feature (33)..(34): n is a, c, g, or t
  misc_feature (43)..(44): n is a, c, g, or t
  misc_feature (53)..(54): n is a, c, g, or t
tttttttaagcagtggtatcaacgcagagtacnngtcataggnncagcaagtnntttttttttttttttttttttttttttttt

SEQ ID NO: 5421 - DNA, 84 bp, Artificial
  Barcode component
  misc_feature (33)..(34): n is a, c, g, or t
  misc_feature (43)..(44): n is a, c, g, or t
  misc_feature (53)..(54): n is a, c, g, or t
tttttttaagcagtggtatcaacgcagagtacnngtcataggnnacgaggtanntttttttttttttttttttttttttttttt

SEQ ID NO: 5422 - DNA, 84 bp, Artificial
  Barcode component
  misc_feature (33)..(34): n is a, c, g, or t
  misc_feature (43)..(44): n is a, c, g, or t
  misc_feature (53)..(54): n is a, c, g, or t
tttttttaagcagtggtatcaacgcagagtacnngtcataggnncatcttccnntttttttttttttttttttttttttttttt

SEQ ID NO: 5423 - DNA, 84 bp, Artificial
  Barcode component
  misc_feature (33)..(34): n is a, c, g, or t
  misc_feature (43)..(44): n is a, c, g, or t
  misc_feature (53)..(54): n is a, c, g, or t
tttttttaagcagtggtatcaacgcagagtacnngtcataggnncctgaatcnntttttttttttttttttttttttttttttt

SEQ ID NO: 5424 - DNA, 84 bp, Artificial
  Barcode component
  misc_feature (33)..(34): n is a, c, g, or t
  misc_feature (43)..(44): n is a, c, g, or t
  misc_feature (53)..(54): n is a, c, g, or t
tttttttaagcagtggtatcaacgcagagtacnngtcataggnntgcagactnntttttttttttttttttttttttttttttt

SEQ ID NO: 5425 - DNA, 84 bp, Artificial
  Barcode component
  misc_feature (33)..(34): n is a, c, g, or t
  misc_feature (43)..(44): n is a, c, g, or t
  misc_feature (53)..(54): n is a, c, g, or t
tttttttaagcagtggtatcaacgcagagtacnngtcataggnnagatgtggnntttttttttttttttttttttttttttttt

SEQ ID NO: 5426 - DNA, 84 bp, Artificial
  Barcode component
  misc_feature (33)..(34): n is a, c, g, or t
  misc_feature (43)..(44): n is a, c, g, or t
  misc_feature (53)..(54): n is a, c, g, or t
tttttttaagcagtggtatcaacgcagagtacnngtcataggnnagttcgacnntttttttttttttttttttttttttttttt

SEQ ID NO: 5427 - DNA, 84 bp, Artificial
  Barcode component
  misc_feature (33)..(34): n is a, c, g, or t
  misc_feature (43)..(44): n is a, c, g, or t
  misc_feature (53)..(54): n is a, c, g, or t
tttttttaagcagtggtatcaacgcagagtacnngtcataggnnacaacctcnntttttttttttttttttttttttttttttt

SEQ ID NO: 5428 - DNA, 84 bp, Artificial
  Barcode component
  misc_feature (33)..(34): n is a, c, g, or t
  misc_feature (43)..(44): n is a, c, g, or t
  misc_feature (53)..(54): n is a, c, g, or t
tttttttaagcagtggtatcaacgcagagtacnngtcataggnncatggtagnntttttttttttttttttttttttttttttt

SEQ ID NO: 5429 - DNA, 84 bp, Artificial
  Barcode component
  misc_feature (33)..(34): n is a, c, g, or t
  misc_feature (43)..(44): n is a, c, g, or t
  misc_feature (53)..(54): n is a, c, g, or t
tttttttaagcagtggtatcaacgcagagtacnngtcataggnncgtatctcnntttttttttttttttttttttttttttttt

SEQ ID NO: 5430 - DNA, 84 bp, Artificial
  Barcode component
  misc_feature (33)..(34): n is a, c, g, or t
  misc_feature (43)..(44): n is a, c, g, or t
  misc_feature (53)..(54): n is a, c, g, or t
tttttttaagcagtggtatcaacgcagagtacnngtcataggnncctagttcnntttttttttttttttttttttttttttttt

SEQ ID NO: 5431 - DNA, 84 bp, Artificial
  Barcode component
  misc_feature (33)..(34): n is a, c, g, or t
  misc_feature (43)..(44): n is a, c, g, or t
  misc_feature (53)..(54): n is a, c, g, or t
tttttttaagcagtggtatcaacgcagagtacnngtcataggnncaagagtcnntttttttttttttttttttttttttttttt

SEQ ID NO: 5432 - DNA, 84 bp, Artificial
  Barcode component
  misc_feature (33)..(34): n is a, c, g, or t
  misc_feature (43)..(44): n is a, c, g, or t
  misc_feature (53)..(54): n is a, c, g, or t
tttttttaagcagtggtatcaacgcagagtacnngaacggaannaatcggcanntttttttttttttttttttttttttttttt

SEQ ID NO: 5433 - DNA, 84 bp, Artificial
  Barcode component
  misc_feature (33)..(34): n is a, c, g, or t
  misc_feature (43)..(44): n is a, c, g, or t
  misc_feature (53)..(54): n is a, c, g, or t
tttttttaagcagtggtatcaacgcagagtacnngaacggaanntacggcatnntttttttttttttttttttttttttttttt

SEQ ID NO: 5434 - DNA, 84 bp, Artificial
  Barcode component
  misc_feature (33)..(34): n is a, c, g, or t
  misc_feature (43)..(44): n is a, c, g, or t
  misc_feature (53)..(54): n is a, c, g, or t
tttttttaagcagtggtatcaacgcagagtacnngaacggaannttggatcgnntttttttttttttttttttttttttttttt

SEQ ID NO: 5435 - DNA, 84 bp, Artificial
  Barcode component
  misc_feature (33)..(34): n is a, c, g, or t
  misc_feature (43)..(44): n is a, c, g, or t
  misc_feature (53)..(54): n is a, c, g, or t
tttttttaagcagtggtatcaacgcagagtacnngaacggaanntggaacganntttttttttttttttttttttttttttttt

SEQ ID NO: 5436 - DNA, 84 bp, Artificial
  Barcode component
  misc_feature (33)..(34): n is a, c, g, or t
  misc_feature (43)..(44): n is a, c, g, or t
  misc_feature (53)..(54): n is a, c, g, or t
tttttttaagcagtggtatcaacgcagagtacnngaacggaannggcaatcanntttttttttttttttttttttttttttttt

SEQ ID NO: 5437 - DNA, 84 bp, Artificial
  Barcode component
  misc_feature (33)..(34): n is a, c, g, or t
  misc_feature (43)..(44): n is a, c, g, or t
  misc_feature (53)..(54): n is a, c, g, or t
tttttttaagcagtggtatcaacgcagagtacnngaacggaanngaatccganntttttttttttttttttttttttttttttt

SEQ ID NO: 5438 - DNA, 84 bp, Artificial
  Barcode component
  misc_feature (33)..(34): n is a, c, g, or t
  misc_feature (43)..(44): n is a, c, g, or t
  misc_feature (53)..(54): n is a, c, g, or t
tttttttaagcagtggtatcaacgcagagtacnngaacggaannttacggtgnntttttttttttttttttttttttttttttt

SEQ ID NO: 5439 - DNA, 84 bp, Artificial
  Barcode component
  misc_feature (33)..(34): n is a, c, g, or t
  misc_feature (43)..(44): n is a, c, g, or t
  misc_feature (53)..(54): n is a, c, g, or t
tttttttaagcagtggtatcaacgcagagtacnngaacggaanncatatcggnntttttttttttttttttttttttttttttt

SEQ ID NO: 5440 - DNA, 84 bp, Artificial
  Barcode component
  misc_feature (33)..(34): n is a, c, g, or t
  misc_feature (43)..(44): n is a, c, g, or t
  misc_feature (53)..(54): n is a, c, g, or t
tttttttaagcagtggtatcaacgcagagtacnngaacggaanncttcggtanntttttttttttttttttttttttttttttt

SEQ ID NO: 5441 - DNA, 84 bp, Artificial
  Barcode component
  misc_feature (33)..(34): n is a, c, g, or t
  misc_feature (43)..(44): n is a, c, g, or t
  misc_feature (53)..(54): n is a, c, g, or t
tttttttaagcagtggtatcaacgcagagtacnngaacggaanntcctaacgnntttttttttttttttttttttttttttttt

SEQ ID NO: 5442 - DNA, 84 bp, Artificial
  Barcode component
  misc_feature (33)..(34): n is a, c, g, or t
  misc_feature (43)..(44): n is a, c, g, or t
  misc_feature (53)..(54): n is a, c, g, or t
tttttttaagcagtggtatcaacgcagagtacnngaacggaanngtaagccanntttttttttttttttttttttttttttttt

SEQ ID NO: 5443 - DNA, 84 bp, Artificial
  Barcode component
  misc_feature (33)..(34): n is a, c, g, or t
  misc_feature (43)..(44): n is a, c, g, or t
  misc_feature (53)..(54): n is a, c, g, or t
tttttttaagcagtggtatcaacgcagagtacnngaacggaanntaaggtggnntttttttttttttttttttttttttttttt

SEQ ID NO: 5444 - DNA, 84 bp, Artificial
  Barcode component
  misc_feature (33)..(34): n is a, c, g, or t
  misc_feature (43)..(44): n is a, c, g, or t
  misc_feature (53)..(54): n is a, c, g, or t
tttttttaagcagtggtatcaacgcagagtacnngaacggaannggtaagctnntttttttttttttttttttttttttttttt

SEQ ID NO: 5445 - DNA, 84 bp, Artificial
  Barcode component
  misc_feature (33)..(34): n is a, c, g, or t
  misc_feature (43)..(44): n is a, c, g, or t
  misc_feature (53)..(54): n is a, c, g, or t
tttttttaagcagtggtatcaacgcagagtacnngaacggaanntgtgtcganntttttttttttttttttttttttttttttt

SEQ ID NO: 5446 - DNA, 84 bp, Artificial
  Barcode component
  misc_feature (33)..(34): n is a, c, g, or t
  misc_feature (43)..(44): n is a, c, g, or t
  misc_feature (53)..(54): n is a, c, g, or t
tttttttaagcagtggtatcaacgcagagtacnngaacggaanngagcatganntttttttttttttttttttttttttttttt

SEQ ID NO: 5447 - DNA, 84 bp, Artificial
  Barcode component
  misc_feature (33)..(34): n is a, c, g, or t
  misc_feature (43)..(44): n is a, c, g, or t
  misc_feature (53)..(54): n is a, c, g, or t
tttttttaagcagtggtatcaacgcagagtacnngaacggaanntcgaagtcnntttttttttttttttttttttttttttttt

SEQ ID NO: 5448 - DNA, 84 bp, Artificial
  Barcode component
  misc_feature (33)..(34): n is a, c, g, or t
  misc_feature (43)..(44): n is a, c, g, or t
  misc_feature (53)..(54): n is a, c, g, or t
tttttttaagcagtggtatcaacgcagagtacnngaacggaannggtgaacanntttttttttttttttttttttttttttttt

SEQ ID NO: 5449 - DNA, 84 bp, Artificial
  Barcode component
  misc_feature (33)..(34): n is a, c, g, or t
  misc_feature (43)..(44): n is a, c, g, or t
  misc_feature (53)..(54): n is a, c, g, or t
tttttttaagcagtggtatcaacgcagagtacnngaacggaannacatgcacnntttttttttttttttttttttttttttttt

SEQ ID NO: 5450 - DNA, 84 bp, Artificial
  Barcode component
  misc_feature (33)..(34): n is a, c, g, or t
  misc_feature (43)..(44): n is a, c, g, or t
  misc_feature (53)..(54): n is a, c, g, or t
tttttttaagcagtggtatcaacgcagagtacnngaacggaannccaacagtnntttttttttttttttttttttttttttttt

SEQ ID NO: 5451 - DNA, 84 bp, Artificial
  Barcode component
  misc_feature (33)..(34): n is a, c, g, or t
  misc_feature (43)..(44): n is a, c, g, or t
  misc_feature (53)..(54): n is a, c, g, or t
tttttttaagcagtggtatcaacgcagagtacnngaacggaannagaacagcnntttttttttttttttttttttttttttttt

SEQ ID NO: 5452 - DNA, 84 bp, Artificial
  Barcode component
  misc_feature (33)..(34): n is a, c, g, or t
  misc_feature (43)..(44): n is a, c, g, or t
  misc_feature (53)..(54): n is a, c, g, or t
tttttttaagcagtggtatcaacgcagagtacnngaacggaanngaacacgtnntttttttttttttttttttttttttttttt

SEQ ID NO: 5453 - DNA, 84 bp, Artificial
  Barcode component
  misc_feature (33)..(34): n is a, c, g, or t
  misc_feature (43)..(44): n is a, c, g, or t
  misc_feature (53)..(54): n is a, c, g, or t
tttttttaagcagtggtatcaacgcagagtacnngaacggaannggtcttcanntttttttttttttttttttttttttttttt

SEQ ID NO: 5454 - DNA, 84 bp, Artificial
  Barcode component
  misc_feature (33)..(34): n is a, c, g, or t
  misc_feature (43)..(44): n is a, c, g, or t
  misc_feature (53)..(54): n is a, c, g, or t
tttttttaagcagtggtatcaacgcagagtacnngaacggaannaggttcagnntttttttttttttttttttttttttttttt

SEQ ID NO: 5455 - DNA, 84 bp, Artificial
  Barcode component
  misc_feature (33)..(34): n is a, c, g, or t
  misc_feature (43)..(44): n is a, c, g, or t
  misc_feature (53)..(54): n is a, c, g, or t
tttttttaagcagtggtatcaacgcagagtacnngaacggaannctagagcanntttttttttttttttttttttttttttttt

SEQ ID NO: 5456 - DNA, 84 bp, Artificial
  Barcode component
  misc_feature (33)..(34): n is a, c, g, or t
  misc_feature (43)..(44): n is a, c, g, or t
  misc_feature (53)..(54): n is a, c, g, or t
tttttttaagcagtggtatcaacgcagagtacnngaacggaanncttctagcnntttttttttttttttttttttttttttttt

SEQ ID NO: 5457 - DNA, 84 bp, Artificial
  Barcode component
  misc_feature (33)..(34): n is a, c, g, or t
  misc_feature (43)..(44): n is a, c, g, or t
  misc_feature (53)..(54): n is a, c, g, or t
tttttttaagcagtggtatcaacgcagagtacnngaacggaanngagtaacgnntttttttttttttttttttttttttttttt

SEQ ID NO: 5458 - DNA, 84 bp, Artificial
  Barcode component
  misc_feature (33)..(34): n is a, c, g, or t
  misc_feature (43)..(44): n is a, c, g, or t
  misc_feature (53)..(54): n is a, c, g, or t
tttttttaagcagtggtatcaacgcagagtacnngaacggaannctaagaggnntttttttttttttttttttttttttttttt

SEQ ID NO: 5459 - DNA, 84 bp, Artificial
  Barcode component
  misc_feature (33)..(34): n is a, c, g, or t
  misc_feature (43)..(44): n is a, c, g, or t
  misc_feature (53)..(54): n is a, c, g, or t
tttttttaagcagtggtatcaacgcagagtacnngaacggaannacgtgtagnntttttttttttttttttttttttttttttt

SEQ ID NO: 5460 - DNA, 84 bp, Artificial
  Barcode component
  misc_feature (33)..(34): n is a, c, g, or t
  misc_feature (43)..(44): n is a, c, g, or t
  misc_feature (53)..(54): n is a, c, g, or t
tttttttaagcagtggtatcaacgcagagtacnngaacggaannactacaggnntttttttttttttttttttttttttttttt

SEQ ID NO: 5461 - DNA, 84 bp, Artificial
  Barcode component
  misc_feature (33)..(34): n is a, c, g, or t
  misc_feature (43)..(44): n is a, c, g, or t
  misc_feature (53)..(54): n is a, c, g, or t
tttttttaagcagtggtatcaacgcagagtacnngaacggaanntacaggtcnntttttttttttttttttttttttttttttt

SEQ ID NO: 5462 - DNA, 84 bp, Artificial
  Barcode component
  misc_feature (33)..(34): n is a, c, g, or t
  misc_feature (43)..(44): n is a, c, g, or t
  misc_feature (53)..(54): n is a, c, g, or t
tttttttaagcagtggtatcaacgcagagtacnngaacggaannctcacatgnntttttttttttttttttttttttttttttt

SEQ ID NO: 5463 - DNA, 84 bp, Artificial
  Barcode component
  misc_feature (33)..(34): n is a, c, g, or t
  misc_feature (43)..(44): n is a, c, g, or t
  misc_feature (53)..(54): n is a, c, g, or t
tttttttaagcagtggtatcaacgcagagtacnngaacggaannactaggagnntttttttttttttttttttttttttttttt

SEQ ID NO: 5464 - DNA, 84 bp, Artificial
  Barcode component
  misc_feature (33)..(34): n is a, c, g, or t
  misc_feature (43)..(44): n is a, c, g, or t
  misc_feature (53)..(54): n is a, c, g, or t
tttttttaagcagtggtatcaacgcagagtacnngaacggaannccatagganntttttttttttttttttttttttttttttt

SEQ ID NO: 5465 - DNA, 84 bp, Artificial
  Barcode component
  misc_feature (33)..(34): n is a, c, g, or t
  misc_feature (43)..(44): n is a, c, g, or t
  misc_feature (53)..(54): n is a, c, g, or t
tttttttaagcagtggtatcaacgcagagtacnngaacggaannggagaatcnntttttttttttttttttttttttttttttt

SEQ ID NO: 5466 - DNA, 84 bp, Artificial
  Barcode component
  misc_feature (33)..(34): n is a, c, g, or t
  misc_feature (43)..(44): n is a, c, g, or t
  misc_feature (53)..(54): n is a, c, g, or t
tttttttaagcagtggtatcaacgcagagtacnngaacggaanngccaagaanntttttttttttttttttttttttttttttt

SEQ ID NO: 5467 - DNA, 84 bp, Artificial
  Barcode component
  misc_feature (33)..(34): n is a, c, g, or t
  misc_feature (43)..(44): n is a, c, g, or t
  misc_feature (53)..(54): n is a, c, g, or t
tttttttaagcagtggtatcaacgcagagtacnngaacggaannaaggcaagnntttttttttttttttttttttttttttttt

SEQ ID NO: 5468 - DNA, 84 bp, Artificial
  Barcode component
  misc_feature (33)..(34): n is a, c, g, or t
  misc_feature (43)..(44): n is a, c, g, or t
  misc_feature (53)..(54): n is a, c, g, or t
tttttttaagcagtggtatcaacgcagagtacnngaacggaannaatgtcgcnntttttttttttttttttttttttttttttt

SEQ ID NO: 5469 - DNA, 84 bp, Artificial
  Barcode component
  misc_feature (33)..(34): n is a, c, g, or t
  misc_feature (43)..(44): n is a, c, g, or t
  misc_feature (53)..(54): n is a, c, g, or t
tttttttaagcagtggtatcaacgcagagtacnngaacggaannatggaaccnntttttttttttttttttttttttttttttt

SEQ ID NO: 5470 - DNA, 84 bp, Artificial
  Barcode component
  misc_feature (33)..(34): n is a, c, g, or t
  misc_feature (43)..(44): n is a, c, g, or t
  misc_feature (53)..(54): n is a, c, g, or t
tttttttaagcagtggtatcaacgcagagtacnngaacggaannagaggcatnntttttttttttttttttttttttttttttt

SEQ ID NO: 5471 - DNA, 84 bp, Artificial
  Barcode component
  misc_feature (33)..(34): n is a, c, g, or t
  misc_feature (43)..(44): n is a, c, g, or t
  misc_feature (53)..(54): n is a, c, g, or t
tttttttaagcagtggtatcaacgcagagtacnngaacggaanntgcatagcnntttttttttttttttttttttttttttttt

SEQ ID NO: 5472 - DNA, 84 bp, Artificial
  Barcode component
  misc_feature (33)..(34): n is a, c, g, or t
  misc_feature (43)..(44): n is a, c, g, or t
  misc_feature (53)..(54): n is a, c, g, or t
tttttttaagcagtggtatcaacgcagagtacnngaacggaannctaacgganntttttttttttttttttttttttttttttt

SEQ ID NO: 5473 - DNA, 84 bp, Artificial
  Barcode component
  misc_feature (33)..(34): n is a, c, g, or t
  misc_feature (43)..(44): n is a, c, g, or t
  misc_feature (53)..(54): n is a, c, g, or t
tttttttaagcagtggtatcaacgcagagtacnngaacggaanntatcgaggnntttttttttttttttttttttttttttttt

SEQ ID NO: 5474 - DNA, 84 bp, Artificial
  Barcode component
  misc_feature (33)..(34): n is a, c, g, or t
  misc_feature (43)..(44): n is a, c, g, or t
  misc_feature (53)..(54): n is a, c, g, or t
tttttttaagcagtggtatcaacgcagagtacnngaacggaanncatagcctnntttttttttttttttttttttttttttttt

SEQ ID NO: 5475 - DNA, 84 bp, Artificial
  Barcode component
  misc_feature (33)..(34): n is a, c, g, or t
  misc_feature (43)..(44): n is a, c, g, or t
  misc_feature (53)..(54): n is a, c, g, or t
tttttttaagcagtggtatcaacgcagagtacnngaacggaannatcgagacnntttttttttttttttttttttttttttttt

SEQ ID NO: 5476 - DNA, 84 bp, Artificial
  Barcode component
  misc_feature (33)..(34): n is a, c, g, or t
  misc_feature (43)..(44): n is a, c, g, or t
  misc_feature (53)..(54): n is a, c, g, or t
tttttttaagcagtggtatcaacgcagagtacnngaacggaannggaagagtnntttttttttttttttttttttttttttttt

SEQ ID NO: 5477 - DNA, 84 bp, Artificial
  Barcode component
  misc_feature (33)..(34): n is a, c, g, or t
  misc_feature (43)..(44): n is a, c, g, or t
  misc_feature (53)..(54): n is a, c, g, or t
tttttttaagcagtggtatcaacgcagagtacnngaacggaannccaagtagnntttttttttttttttttttttttttttttt

SEQ ID NO: 5478 - DNA, 84 bp, Artificial
  Barcode component
  misc_feature (33)..(34): n is a, c, g, or t
  misc_feature (43)..(44): n is a, c, g, or t
  misc_feature (53)..(54): n is a, c, g, or t
tttttttaagcagtggtatcaacgcagagtacnngaacggaannctgaacagnntttttttttttttttttttttttttttttt

SEQ ID NO: 5479 - DNA, 84 bp, Artificial
  Barcode component
  misc_feature (33)..(34): n is a, c, g, or t
  misc_feature (43)..(44): n is a, c, g, or t
  misc_feature (53)..(54): n is a, c, g, or t
tttttttaagcagtggtatcaacgcagagtacnngaacggaanngtaggttcnntttttttttttttttttttttttttttttt

SEQ ID NO: 5480 - DNA, 84 bp, Artificial
  Barcode component
  misc_feature (33)..(34): n is a, c, g, or t
  misc_feature (43)..(44): n is a, c, g, or t
  misc_feature (53)..(54): n is a, c, g, or t
tttttttaagcagtggtatcaacgcagagtacnngaacggaanngtatggacnntttttttttttttttttttttttttttttt

SEQ ID NO: 5481 - DNA, 84 bp, Artificial
  Barcode component
  misc_feature (33)..(34): n is a, c, g, or t
  misc_feature (43)..(44): n is a, c, g, or t
  misc_feature (53)..(54): n is a, c, g, or t
tttttttaagcagtggtatcaacgcagagtacnngaacggaanntcgcaacanntttttttttttttttttttttttttttttt

SEQ ID NO: 5482 - DNA, 84 bp, Artificial
  Barcode component
  misc_feature (33)..(34): n is a, c, g, or t
  misc_feature (43)..(44): n is a, c, g, or t
  misc_feature (53)..(54): n is a, c, g, or t
tttttttaagcagtggtatcaacgcagagtacnngaacggaannccgctaatnntttttttttttttttttttttttttttttt

SEQ ID NO: 5483 - DNA, 84 bp, Artificial
  Barcode component
  misc_feature (33)..(34): n is a, c, g, or t
  misc_feature (43)..(44): n is a, c, g, or t
  misc_feature (53)..(54): n is a, c, g, or t
tttttttaagcagtggtatcaacgcagagtacnngaacggaanngattcgcanntttttttttttttttttttttttttttttt

SEQ ID NO: 5484 - DNA, 84 bp, Artificial
  Barcode component
  misc_feature (33)..(34): n is a, c, g, or t
  misc_feature (43)..(44): n is a, c, g, or t
  misc_feature (53)..(54): n is a, c, g, or t
tttttttaagcagtggtatcaacgcagagtacnngaacggaanncgatggaanntttttttttttttttttttttttttttttt

SEQ ID NO: 5485 - DNA, 84 bp, Artificial
  Barcode component
  misc_feature (33)..(34): n is a, c, g, or t
  misc_feature (43)..(44): n is a, c, g, or t
  misc_feature (53)..(54): n is a, c, g, or t
tttttttaagcagtggtatcaacgcagagtacnngaacggaannagcaagganntttttttttttttttttttttttttttttt

SEQ ID NO: 5486 - DNA, 84 bp, Artificial
  Barcode component
  misc_feature (33)..(34): n is a, c, g, or t
  misc_feature (43)..(44): n is a, c, g, or t
  misc_feature (53)..(54): n is a, c, g, or t
tttttttaagcagtggtatcaacgcagagtacnngaacggaanncgtagcaanntttttttttttttttttttttttttttttt

SEQ ID NO: 5487 - DNA, 84 bp, Artificial
  Barcode component
  misc_feature (33)..(34): n is a, c, g, or t
  misc_feature (43)..(44): n is a, c, g, or t
  misc_feature (53)..(54): n is a, c, g, or t
tttttttaagcagtggtatcaacgcagagtacnngaacggaanntggcagtanntttttttttttttttttttttttttttttt

SEQ ID NO: 5488 - DNA, 84 bp, Artificial
  Barcode component
  misc_feature (33)..(34): n is a, c, g, or t
  misc_feature (43)..(44): n is a, c, g, or t
  misc_feature (53)..(54): n is a, c, g, or t
tttttttaagcagtggtatcaacgcagagtacnngaacggaanncggtagttnntttttttttttttttttttttttttttttt

SEQ ID NO: 5489 - DNA, 84 bp, Artificial
  Barcode component
  misc_feature (33)..(34): n is a, c, g, or t
  misc_feature (43)..(44): n is a, c, g, or t
  misc_feature (53)..(54): n is a, c, g, or t
tttttttaagcagtggtatcaacgcagagtacnngaacggaanntgacttcgnntttttttttttttttttttttttttttttt

SEQ ID NO: 5490 - DNA, 84 bp, Artificial
  Barcode component
  misc_feature (33)..(34): n is a, c, g, or t
  misc_feature (43)..(44): n is a, c, g, or t
  misc_feature (53)..(54): n is a, c, g, or t
tttttttaagcagtggtatcaacgcagagtacnngaacggaanngagtgcaanntttttttttttttttttttttttttttttt

SEQ ID NO: 5491 - DNA, 84 bp, Artificial
  Barcode component
  misc_feature (33)..(34): n is a, c, g, or t
  misc_feature (43)..(44): n is a, c, g, or t
  misc_feature (53)..(54): n is a, c, g, or t
tttttttaagcagtggtatcaacgcagagtacnngaacggaannacggtaacnntttttttttttttttttttttttttttttt

SEQ ID NO: 5492 - DNA, 84 bp, Artificial
  Barcode component
  misc_feature (33)..(34): n is a, c, g, or t
  misc_feature (43)..(44): n is a, c, g, or t
  misc_feature (53)..(54): n is a, c, g, or t
tttttttaagcagtggtatcaacgcagagtacnngaacggaannaagtggtgnntttttttttttttttttttttttttttttt

SEQ ID NO: 5493 - DNA, 84 bp, Artificial
  Barcode component
  misc_feature (33)..(34): n is a, c, g, or t
  misc_feature (43)..(44): n is a, c, g, or t
  misc_feature (53)..(54): n is a, c, g, or t
tttttttaagcagtggtatcaacgcagagtacnngaacggaannggagacaanntttttttttttttttttttttttttttttt

SEQ ID NO: 5494 - DNA, 84 bp, Artificial
  Barcode component
  misc_feature (33)..(34): n is a, c, g, or t
  misc_feature (43)..(44): n is a, c, g, or t
  misc_feature (53)..(54): n is a, c, g, or t
tttttttaagcagtggtatcaacgcagagtacnngaacggaanntcaaggacnntttttttttttttttttttttttttttttt

SEQ ID NO: 5495 - DNA, 84 bp, Artificial
  Barcode component
  misc_feature (33)..(34): n is a, c, g, or t
  misc_feature (43)..(44): n is a, c, g, or t
  misc_feature (53)..(54): n is a, c, g, or t
tttttttaagcagtggtatcaacgcagagtacnngaacggaannaagagagcnntttttttttttttttttttttttttttttt

SEQ ID NO: 5496 - DNA, 84 bp, Artificial
  Barcode component
  misc_feature (33)..(34): n is a, c, g, or t
  misc_feature (43)..(44): n is a, c, g, or t
  misc_feature (53)..(54): n is a, c, g, or t
tttttttaagcagtggtatcaacgcagagtacnngaacggaanncgagagatnntttttttttttttttttttttttttttttt

SEQ ID NO: 5497 - DNA, 84 bp, Artificial
  Barcode component
  misc_feature (33)..(34): n is a, c, g, or t
  misc_feature (43)..(44): n is a, c, g, or t
  misc_feature (53)..(54): n is a, c, g, or t
tttttttaagcagtggtatcaacgcagagtacnngaacggaannacagatggnntttttttttttttttttttttttttttttt

SEQ ID NO: 5498 - DNA, 84 bp, Artificial
  Barcode component
  misc_feature (33)..(34): n is a, c, g, or t
  misc_feature (43)..(44): n is a, c, g, or t
  misc_feature (53)..(54): n is a, c, g, or t
tttttttaagcagtggtatcaacgcagagtacnngaacggaannaggagtcanntttttttttttttttttttttttttttttt

SEQ ID NO: 5499 - DNA, 84 bp, Artificial
  Barcode component
  misc_feature (33)..(34): n is a, c, g, or t
  misc_feature (43)..(44): n is a, c, g, or t
  misc_feature (53)..(54): n is a, c, g, or t
tttttttaagcagtggtatcaacgcagagtacnngaacggaanncgtgttacnntttttttttttttttttttttttttttttt

SEQ ID NO: 5500 - DNA, 84 bp, Artificial
  Barcode component
  misc_feature (33)..(34): n is a, c, g, or t
  misc_feature (43)..(44): n is a, c, g, or t
  misc_feature (53)..(54): n is a, c, g, or t
tttttttaagcagtggtatcaacgcagagtacnngaacggaanntagtgtgcnntttttttttttttttttttttttttttttt

SEQ ID NO: 5501 - DNA, 84 bp, Artificial
  Barcode component
  misc_feature (33)..(34): n is a, c, g, or t
  misc_feature (43)..(44): n is a, c, g, or t
  misc_feature (53)..(54): n is a, c, g, or t
tttttttaagcagtggtatcaacgcagagtacnngaacggaannctcatgacnntttttttttttttttttttttttttttttt

SEQ ID NO: 5502 - DNA, 84 bp, Artificial
  Barcode component
  misc_feature (33)..(34): n is a, c, g, or t
  misc_feature (43)..(44): n is a, c, g, or t
  misc_feature (53)..(54): n is a, c, g, or t
tttttttaagcagtggtatcaacgcagagtacnngaacggaanngtatccagnntttttttttttttttttttttttttttttt

SEQ ID NO: 5503 - DNA, 84 bp, Artificial
  Barcode component
  misc_feature (33)..(34): n is a, c, g, or t
  misc_feature (43)..(44): n is a, c, g, or t
  misc_feature (53)..(54): n is a, c, g, or t
tttttttaagcagtggtatcaacgcagagtacnngaacggaannacgcctatnntttttttttttttttttttttttttttttt

SEQ ID NO: 5504 - DNA, 84 bp, Artificial
  Barcode component
  misc_feature (33)..(34): n is a, c, g, or t
  misc_feature (43)..(44): n is a, c, g, or t
  misc_feature (53)..(54): n is a, c, g, or t
tttttttaagcagtggtatcaacgcagagtacnngaacggaannaacgacctnntttttttttttttttttttttttttttttt

SEQ ID NO: 5505 - DNA, 84 bp, Artificial
  Barcode component
  misc_feature (33)..(34): n is a, c, g, or t
  misc_feature (43)..(44): n is a, c, g, or t
  misc_feature (53)..(54): n is a, c, g, or t
tttttttaagcagtggtatcaacgcagagtacnngaacggaannatcaggctnntttttttttttttttttttttttttttttt

SEQ ID NO: 5506 - DNA, 84 bp, Artificial
  Barcode component
  misc_feature (33)..(34): n is a, c, g, or t
  misc_feature (43)..(44): n is a, c, g, or t
  misc_feature (53)..(54): n is a, c, g, or t
tttttttaagcagtggtatcaacgcagagtacnngaacggaanncaagttcgnntttttttttttttttttttttttttttttt

SEQ ID NO: 5507 - DNA, 84 bp, Artificial
  Barcode component
  misc_feature (33)..(34): n is a, c, g, or t
  misc_feature (43)..(44): n is a, c, g, or t
  misc_feature (53)..(54): n is a, c, g, or t
tttttttaagcagtggtatcaacgcagagtacnngaacggaanntagccaganntttttttttttttttttttttttttttttt

SEQ ID NO: 5508 - DNA, 84 bp, Artificial
  Barcode component
  misc_feature (33)..(34): n is a, c, g, or t
  misc_feature (43)..(44): n is a, c, g, or t
  misc_feature (53)..(54): n is a, c, g, or t
tttttttaagcagtggtatcaacgcagagtacnngaacggaanncaatcacgnntttttttttttttttttttttttttttttt

SEQ ID NO: 5509 - DNA, 84 bp, Artificial
  Barcode component
  misc_feature (33)..(34): n is a, c, g, or t
  misc_feature (43)..(44): n is a, c, g, or t
  misc_feature (53)..(54): n is a, c, g, or t
tttttttaagcagtggtatcaacgcagagtacnngaacggaanngcaacaagnntttttttttttttttttttttttttttttt

SEQ ID NO: 5510 - DNA, 84 bp, Artificial
  Barcode component
  misc_feature (33)..(34): n is a, c, g, or t
  misc_feature (43)..(44): n is a, c, g, or t
  misc_feature (53)..(54): n is a, c, g, or t
tttttttaagcagtggtatcaacgcagagtacnngaacggaanncacgacaanntttttttttttttttttttttttttttttt

SEQ ID NO: 5511 - DNA, 84 bp, Artificial
  Barcode component
  misc_feature (33)..(34): n is a, c, g, or t
  misc_feature (43)..(44): n is a, c, g, or t
  misc_feature (53)..(54): n is a, c, g, or t
tttttttaagcagtggtatcaacgcagagtacnngaacggaanntacggaganntttttttttttttttttttttttttttttt

SEQ ID NO: 5512 - DNA, 84 bp, Artificial
  Barcode component
  misc_feature (33)..(34): n is a, c, g, or t
  misc_feature (43)..(44): n is a, c, g, or t
  misc_feature (53)..(54): n is a, c, g, or t
tttttttaagcagtggtatcaacgcagagtacnngaacggaanncgacaaganntttttttttttttttttttttttttttttt

SEQ ID NO: 5513 - DNA, 84 bp, Artificial
  Barcode component
  misc_feature (33)..(34): n is a, c, g, or t
  misc_feature (43)..(44): n is a, c, g, or t
  misc_feature (53)..(54): n is a, c, g, or t
tttttttaagcagtggtatcaacgcagagtacnngaacggaanncgaagtganntttttttttttttttttttttttttttttt

SEQ ID NO: 5514 - DNA, 84 bp, Artificial
  Barcode component
  misc_feature (33)..(34): n is a, c, g, or t
  misc_feature (43)..(44): n is a, c, g, or t
  misc_feature (53)..(54): n is a, c, g, or t
tttttttaagcagtggtatcaacgcagagtacnngaacggaannagctggtanntttttttttttttttttttttttttttttt

SEQ ID NO: 5515 - DNA, 84 bp, Artificial
  Barcode component
  misc_feature (33)..(34): n is a, c, g, or t
  misc_feature (43)..(44): n is a, c, g, or t
  misc_feature (53)..(54): n is a, c, g, or t
tttttttaagcagtggtatcaacgcagagtacnngaacggaannaactaggcnntttttttttttttttttttttttttttttt

SEQ ID NO: 5516 - DNA, 84 bp, Artificial
  Barcode component
  misc_feature (33)..(34): n is a, c, g, or t
  misc_feature (43)..(44): n is a, c, g, or t
  misc_feature (53)..(54): n is a, c, g, or t
tttttttaagcagtggtatcaacgcagagtacnngaacggaanncagcaagtnntttttttttttttttttttttttttttttt

SEQ ID NO: 5517 - DNA, 84 bp, Artificial
  Barcode component
  misc_feature (33)..(34): n is a, c, g, or t
  misc_feature (43)..(44): n is a, c, g, or t
  misc_feature (53)..(54): n is a, c, g, or t
tttttttaagcagtggtatcaacgcagagtacnngaacggaannacgaggtanntttttttttttttttttttttttttttttt

SEQ ID NO: 5518 - DNA, 84 bp, Artificial
  Barcode component
  misc_feature (33)..(34): n is a, c, g, or t
  misc_feature (43)..(44): n is a, c, g, or t
  misc_feature (53)..(54): n is a, c, g, or t
tttttttaagcagtggtatcaacgcagagtacnngaacggaanncatcttccnntttttttttttttttttttttttttttttt

SEQ ID NO: 5519 - DNA, 84 bp, Artificial
  Barcode component
  misc_feature (33)..(34): n is a, c, g, or t
  misc_feature (43)..(44): n is a, c, g, or t
  misc_feature (53)..(54): n is a, c, g, or t
tttttttaagcagtggtatcaacgcagagtacnngaacggaanncctgaatcnntttttttttttttttttttttttttttttt

SEQ ID NO: 5520 - DNA, 84 bp, Artificial
  Barcode component
  misc_feature (33)..(34): n is a, c, g, or t
  misc_feature (43)..(44): n is a, c, g, or t
  misc_feature (53)..(54): n is a, c, g, or t
tttttttaagcagtggtatcaacgcagagtacnngaacggaanntgcagactnntttttttttttttttttttttttttttttt

SEQ ID NO: 5521 - DNA, 84 bp, Artificial
  Barcode component
  misc_feature (33)..(34): n is a, c, g, or t
  misc_feature (43)..(44): n is a, c, g, or t
  misc_feature (53)..(54): n is a, c, g, or t
tttttttaagcagtggtatcaacgcagagtacnngaacggaannagatgtggnntttttttttttttttttttttttttttttt

SEQ ID NO: 5522 - DNA, 84 bp, Artificial
  Barcode component
  misc_feature (33)..(34): n is a, c, g, or t
  misc_feature (43)..(44): n is a, c, g, or t
  misc_feature (53)..(54): n is a, c, g, or t
tttttttaagcagtggtatcaacgcagagtacnngaacggaannagttcgacnntttttttttttttttttttttttttttttt

SEQ ID NO: 5523 - DNA, 84 bp, Artificial
  Barcode component
  misc_feature (33)..(34): n is a, c, g, or t
  misc_feature (43)..(44): n is a, c, g, or t
  misc_feature (53)..(54): n is a, c, g, or t
tttttttaagcagtggtatcaacgcagagtacnngaacggaannacaacctcnntttttttttttttttttttttttttttttt

SEQ ID NO: 5524 - DNA, 84 bp, Artificial
  Barcode component
  misc_feature (33)..(34): n is a, c, g, or t
  misc_feature (43)..(44): n is a, c, g, or t
  misc_feature (53)..(54): n is a, c, g, or t
tttttttaagcagtggtatcaacgcagagtacnngaacggaanncatggtagnntttttttttttttttttttttttttttttt

SEQ ID NO: 5525 - DNA, 84 bp, Artificial
  Barcode component
  misc_feature (33)..(34): n is a, c, g, or t
  misc_feature (43)..(44): n is a, c, g, or t
  misc_feature (53)..(54): n is a, c, g, or t
tttttttaagcagtggtatcaacgcagagtacnngaacggaanncgtatctcnntttttttttttttttttttttttttttttt

SEQ ID NO: 5526 - DNA, 84 bp, Artificial
  Barcode component
  misc_feature (33)..(34): n is a, c, g, or t
  misc_feature (43)..(44): n is a, c, g, or t
  misc_feature (53)..(54): n is a, c, g, or t
tttttttaagcagtggtatcaacgcagagtacnngaacggaanncctagttcnntttttttttttttttttttttttttttttt

SEQ ID NO: 5527 - DNA, 84 bp, Artificial
  Barcode component
  misc_feature (33)..(34): n is a, c, g, or t
  misc_feature (43)..(44): n is a, c, g, or t
  misc_feature (53)..(54): n is a, c, g, or t
tttttttaagcagtggtatcaacgcagagtacnngaacggaanncaagagtcnntttttttttttttttttttttttttttttt

SEQ ID NO: 5528 - DNA, 84 bp, Artificial
  Barcode component
  misc_feature (33)..(34): n is a, c, g, or t
  misc_feature (43)..(44): n is a, c, g, or t
  misc_feature (53)..(54): n is a, c, g, or t
tttttttaagcagtggtatcaacgcagagtacnnaatggacgnnaatcggcanntttttttttttttttttttttttttttttt

SEQ ID NO: 5529 - DNA, 84 bp, Artificial
  Barcode component
  misc_feature (33)..(34): n is a, c, g, or t
  misc_feature (43)..(44): n is a, c, g, or t
  misc_feature (53)..(54): n is a, c, g, or t
tttttttaagcagtggtatcaacgcagagtacnnaatggacgnntacggcatnntttttttttttttttttttttttttttttt

SEQ ID NO: 5530 - DNA, 84 bp, Artificial
  Barcode component
  misc_feature (33)..(34): n is a, c, g, or t
  misc_feature (43)..(44): n is a, c, g, or t
  misc_feature (53)..(54): n is a, c, g, or t
tttttttaagcagtggtatcaacgcagagtacnnaatggacgnnttggatcgnntttttttttttttttttttttttttttttt

SEQ ID NO: 5531 - DNA, 84 bp, Artificial
  Barcode component
  misc_feature (33)..(34): n is a, c, g, or t
  misc_feature (43)..(44): n is a, c, g, or t
  misc_feature (53)..(54): n is a, c, g, or t
tttttttaagcagtggtatcaacgcagagtacnnaatggacgnntggaacganntttttttttttttttttttttttttttttt

SEQ ID NO: 5532 - DNA, 84 bp, Artificial
  Barcode component
  misc_feature (33)..(34): n is a, c, g, or t
  misc_feature (43)..(44): n is a, c, g, or t
  misc_feature (53)..(54): n is a, c, g, or t
tttttttaagcagtggtatcaacgcagagtacnnaatggacgnnggcaatcanntttttttttttttttttttttttttttttt

SEQ ID NO: 5533 - DNA, 84 bp, Artificial
  Barcode component
  misc_feature (33)..(34): n is a, c, g, or t
  misc_feature (43)..(44): n is a, c, g, or t
  misc_feature (53)..(54): n is a, c, g, or t
tttttttaagcagtggtatcaacgcagagtacnnaatggacgnngaatccganntttttttttttttttttttttttttttttt

SEQ ID NO: 5534 - DNA, 84 bp, Artificial
  Barcode component
  misc_feature (33)..(34): n is a, c, g, or t
  misc_feature (43)..(44): n is a, c, g, or t
  misc_feature (53)..(54): n is a, c, g, or t
tttttttaagcagtggtatcaacgcagagtacnnaatggacgnnttacggtgnntttttttttttttttttttttttttttttt

SEQ ID NO: 5535 - DNA, 84 bp, Artificial
  Barcode component
  misc_feature (33)..(34): n is a, c, g, or t
  misc_feature (43)..(44): n is a, c, g, or t
  misc_feature (53)..(54): n is a, c, g, or t
tttttttaagcagtggtatcaacgcagagtacnnaatggacgnncatatcggnntttttttttttttttttttttttttttttt

SEQ ID NO: 5536 - DNA, 84 bp, Artificial
  Barcode component
  misc_feature (33)..(34): n is a, c, g, or t
  misc_feature (43)..(44): n is a, c, g, or t
  misc_feature (53)..(54): n is a, c, g, or t
tttttttaagcagtggtatcaacgcagagtacnnaatggacgnncttcggtanntttttttttttttttttttttttttttttt

SEQ ID NO: 5537 - DNA, 84 bp, Artificial
  Barcode component
  misc_feature (33)..(34): n is a, c, g, or t
  misc_feature (43)..(44): n is a, c, g, or t
  misc_feature (53)..(54): n is a, c, g, or t
tttttttaagcagtggtatcaacgcagagtacnnaatggacgnntcctaacgnntttttttttttttttttttttttttttttt

SEQ ID NO: 5538 - DNA, 84 bp, Artificial
  Barcode component
  misc_feature (33)..(34): n is a, c, g, or t
  misc_feature (43)..(44): n is a, c, g, or t
  misc_feature (53)..(54): n is a, c, g, or t
tttttttaagcagtggtatcaacgcagagtacnnaatggacgnngtaagccanntttttttttttttttttttttttttttttt

SEQ ID NO: 5539 - DNA, 84 bp, Artificial
  Barcode component
  misc_feature (33)..(34): n is a, c, g, or t
  misc_feature (43)..(44): n is a, c, g, or t
  misc_feature (53)..(54): n is a, c, g, or t
tttttttaagcagtggtatcaacgcagagtacnnaatggacgnntaaggtggnntttttttttttttttttttttttttttttt

SEQ ID NO: 5540 - DNA, 84 bp, Artificial
  Barcode component
  misc_feature (33)..(34): n is a, c, g, or t
  misc_feature (43)..(44): n is a, c, g, or t
  misc_feature (53)..(54): n is a, c, g, or t
tttttttaagcagtggtatcaacgcagagtacnnaatggacgnnggtaagctnntttttttttttttttttttttttttttttt

SEQ ID NO: 5541 - DNA, 84 bp, Artificial
  Barcode component
  misc_feature (33)..(34): n is a, c, g, or t
  misc_feature (43)..(44): n is a, c, g, or t
  misc_feature (53)..(54): n is a, c, g, or t
tttttttaagcagtggtatcaacgcagagtacnnaatggacgnntgtgtcganntttttttttttttttttttttttttttttt

SEQ ID NO: 5542 - DNA, 84 bp, Artificial
  Barcode component
  misc_feature (33)..(34): n is a, c, g, or t
  misc_feature (43)..(44): n is a, c, g, or t
  misc_feature (53)..(54): n is a, c, g, or t
tttttttaagcagtggtatcaacgcagagtacnnaatggacgnngagcatganntttttttttttttttttttttttttttttt

SEQ ID NO: 5543 - DNA, 84 bp, Artificial
  Barcode component
  misc_feature (33)..(34): n is a, c, g, or t
  misc_feature (43)..(44): n is a, c, g, or t
  misc_feature (53)..(54): n is a, c, g, or t
tttttttaagcagtggtatcaacgcagagtacnnaatggacgnntcgaagtcnntttttttttttttttttttttttttttttt

SEQ ID NO: 5544 - DNA, 84 bp, Artificial
  Barcode component
  misc_feature (33)..(34): n is a, c, g, or t
  misc_feature (43)..(44): n is a, c, g, or t
  misc_feature (53)..(54): n is a, c, g, or t
tttttttaagcagtggtatcaacgcagagtacnnaatggacgnnggtgaacanntttttttttttttttttttttttttttttt

SEQ ID NO: 5545 - DNA, 84 bp, Artificial
  Barcode component
  misc_feature (33)..(34): n is a, c, g, or t
  misc_feature (43)..(44): n is a, c, g, or t
  misc_feature (53)..(54): n is a, c, g, or t
tttttttaagcagtggtatcaacgcagagtacnnaatggacgnnacatgcacnntttttttttttttttttttttttttttttt

SEQ ID NO: 5546 - DNA, 84 bp, Artificial
  Barcode component
  misc_feature (33)..(34): n is a, c, g, or t
  misc_feature (43)..(44): n is a, c, g, or t
  misc_feature (53)..(54): n is a, c, g, or t
tttttttaagcagtggtatcaacgcagagtacnnaatggacgnnccaacagtnntttttttttttttttttttttttttttttt

SEQ ID NO: 5547 - DNA, 84 bp, Artificial
  Barcode component
  misc_feature (33)..(34): n is a, c, g, or t
  misc_feature (43)..(44): n is a, c, g, or t
  misc_feature (53)..(54): n is a, c, g, or t
tttttttaagcagtggtatcaacgcagagtacnnaatggacgnnagaacagcnntttttttttttttttttttttttttttttt

SEQ ID NO: 5548 - DNA, 84 bp, Artificial
  Barcode component
  misc_feature (33)..(34): n is a, c, g, or t
  misc_feature (43)..(44): n is a, c, g, or t
  misc_feature (53)..(54): n is a, c, g, or t
tttttttaagcagtggtatcaacgcagagtacnnaatggacgnngaacacgtnntttttttttttttttttttttttttttttt

SEQ ID NO: 5549 - DNA, 84 bp, Artificial
  Barcode component
  misc_feature (33)..(34): n is a, c, g, or t
  misc_feature (43)..(44): n is a, c, g, or t
  misc_feature (53)..(54): n is a, c, g, or t
tttttttaagcagtggtatcaacgcagagtacnnaatggacgnnggtcttcanntttttttttttttttttttttttttttttt

SEQ ID NO: 5550 - DNA, 84 bp, Artificial
  Barcode component
  misc_feature (33)..(34): n is a, c, g, or t
  misc_feature (43)..(44): n is a, c, g, or t
  misc_feature (53)..(54): n is a, c, g, or t
tttttttaagcagtggtatcaacgcagagtacnnaatggacgnnaggttcagnntttttttttttttttttttttttttttttt

SEQ ID NO: 5551 - DNA, 84 bp, Artificial
  Barcode component
  misc_feature (33)..(34): n is a, c, g, or t
  misc_feature (43)..(44): n is a, c, g, or t
  misc_feature (53)..(54): n is a, c, g, or t
tttttttaagcagtggtatcaacgcagagtacnnaatggacgnnctagagcanntttttttttttttttttttttttttttttt

SEQ ID NO: 5552 - DNA, 84 bp, Artificial
  Barcode component
  misc_feature (33)..(34): n is a, c, g, or t
  misc_feature (43)..(44): n is a, c, g, or t
  misc_feature (53)..(54): n is a, c, g, or t
tttttttaagcagtggtatcaacgcagagtacnnaatggacgnncttctagcnntttttttttttttttttttttttttttttt

SEQ ID NO: 5553 - DNA, 84 bp, Artificial
  Barcode component
  misc_feature (33)..(34): n is a, c, g, or t
  misc_feature (43)..(44): n is a, c, g, or t
  misc_feature (53)..(54): n is a, c, g, or t
tttttttaagcagtggtatcaacgcagagtacnnaatggacgnngagtaacgnntttttttttttttttttttttttttttttt

SEQ ID NO: 5554 - DNA, 84 bp, Artificial
  Barcode component
  misc_feature (33)..(34): n is a, c, g, or t
  misc_feature (43)..(44): n is a, c, g, or t
  misc_feature (53)..(54): n is a, c, g, or t
tttttttaagcagtggtatcaacgcagagtacnnaatggacgnnctaagaggnntttttttttttttttttttttttttttttt

SEQ ID NO: 5555 - DNA, 84 bp, Artificial
  Barcode component
  misc_feature (33)..(34): n is a, c, g, or t
  misc_feature (43)..(44): n is a, c, g, or t
  misc_feature (53)..(54): n is a, c, g, or t
tttttttaagcagtggtatcaacgcagagtacnnaatggacgnnacgtgtagnntttttttttttttttttttttttttttttt

SEQ ID NO: 5556 - DNA, 84 bp, Artificial
  Barcode component
  misc_feature (33)..(34): n is a, c, g, or t
  misc_feature (43)..(44): n is a, c, g, or t
  misc_feature (53)..(54): n is a, c, g, or t
tttttttaagcagtggtatcaacgcagagtacnnaatggacgnnactacaggnntttttttttttttttttttttttttttttt

SEQ ID NO: 5557 - DNA, 84 bp, Artificial
  Barcode component
  misc_feature (33)..(34): n is a, c, g, or t
  misc_feature (43)..(44): n is a, c, g, or t
  misc_feature (53)..(54): n is a, c, g, or t
tttttttaagcagtggtatcaacgcagagtacnnaatggacgnntacaggtcnntttttttttttttttttttttttttttttt

SEQ ID NO: 5558 - DNA, 84 bp, Artificial
  Barcode component
  misc_feature (33)..(34): n is a, c, g, or t
  misc_feature (43)..(44): n is a, c, g, or t
  misc_feature (53)..(54): n is a, c, g, or t
tttttttaagcagtggtatcaacgcagagtacnnaatggacgnnctcacatgnntttttttttttttttttttttttttttttt

SEQ ID NO: 5559 - DNA, 84 bp, Artificial
  Barcode component
  misc_feature (33)..(34): n is a, c, g, or t
  misc_feature (43)..(44): n is a, c, g, or t
  misc_feature (53)..(54): n is a, c, g, or t
tttttttaagcagtggtatcaacgcagagtacnnaatggacgnnactaggagnntttttttttttttttttttttttttttttt

SEQ ID NO: 5560 - DNA, 84 bp, Artificial
  Barcode component
  misc_feature (33)..(34): n is a, c, g, or t
  misc_feature (43)..(44): n is a, c, g, or t
  misc_feature (53)..(54): n is a, c, g, or t
tttttttaagcagtggtatcaacgcagagtacnnaatggacgnnccatagganntttttttttttttttttttttttttttttt

SEQ ID NO: 5561 - DNA, 84 bp, Artificial
  Barcode component
  misc_feature (33)..(34): n is a, c, g, or t
  misc_feature (43)..(44): n is a, c, g, or t
  misc_feature (53)..(54): n is a, c, g, or t
tttttttaagcagtggtatcaacgcagagtacnnaatggacgnnggagaatcnntttttttttttttttttttttttttttttt

SEQ ID NO: 5562 - DNA, 84 bp, Artificial
  Barcode component
  misc_feature (33)..(34): n is a, c, g, or t
  misc_feature (43)..(44): n is a, c, g, or t
  misc_feature (53)..(54): n is a, c, g, or t
tttttttaagcagtggtatcaacgcagagtacnnaatggacgnngccaagaanntttttttttttttttttttttttttttttt

SEQ ID NO: 5563 - DNA, 84 bp, Artificial
  Barcode component
  misc_feature (33)..(34): n is a, c, g, or t
  misc_feature (43)..(44): n is a, c, g, or t
  misc_feature (53)..(54): n is a, c, g, or t
tttttttaagcagtggtatcaacgcagagtacnnaatggacgnnaaggcaagnntttttttttttttttttttttttttttttt

SEQ ID NO: 5564 - DNA, 84 bp, Artificial
  Barcode component
  misc_feature (33)..(34): n is a, c, g, or t
  misc_feature (43)..(44): n is a, c, g, or t
  misc_feature (53)..(54): n is a, c, g, or t
tttttttaagcagtggtatcaacgcagagtacnnaatggacgnnaatgtcgcnntttttttttttttttttttttttttttttt

SEQ ID NO: 5565 - DNA, 84 bp, Artificial
  Barcode component
  misc_feature (33)..(34): n is a, c, g, or t
  misc_feature (43)..(44): n is a, c, g, or t
  misc_feature (53)..(54): n is a, c, g, or t
tttttttaagcagtggtatcaacgcagagtacnnaatggacgnnatggaaccnntttttttttttttttttttttttttttttt

SEQ ID NO: 5566 - DNA, 84 bp, Artificial
  Barcode component
  misc_feature (33)..(34): n is a, c, g, or t
  misc_feature (43)..(44): n is a, c, g, or t
  misc_feature (53)..(54): n is a, c, g, or t
tttttttaagcagtggtatcaacgcagagtacnnaatggacgnnagaggcatnntttttttttttttttttttttttttttttt

SEQ ID NO: 5567 - DNA, 84 bp, Artificial
  Barcode component
  misc_feature (33)..(34): n is a, c, g, or t
  misc_feature (43)..(44): n is a, c, g, or t
  misc_feature (53)..(54): n is a, c, g, or t
tttttttaagcagtggtatcaacgcagagtacnnaatggacgnntgcatagcnntttttttttttttttttttttttttttttt

SEQ ID NO: 5568 - DNA, 84 bp, Artificial
  Barcode component
  misc_feature (33)..(34): n is a, c, g, or t
  misc_feature (43)..(44): n is a, c, g, or t
  misc_feature (53)..(54): n is a, c, g, or t
tttttttaagcagtggtatcaacgcagagtacnnaatggacgnnctaacgganntttttttttttttttttttttttttttttt

SEQ ID NO: 5569 - DNA, 84 bp, Artificial
  Barcode component
  misc_feature (33)..(34): n is a, c, g, or t
  misc_feature (43)..(44): n is a, c, g, or t
  misc_feature (53)..(54): n is a, c, g, or t
tttttttaagcagtggtatcaacgcagagtacnnaatggacgnntatcgaggnntttttttttttttttttttttttttttttt

SEQ ID NO: 5570 - DNA, 84 bp, Artificial
  Barcode component
  misc_feature (33)..(34): n is a, c, g, or t
  misc_feature (43)..(44): n is a, c, g, or t
  misc_feature (53)..(54): n is a, c, g, or t
tttttttaagcagtggtatcaacgcagagtacnnaatggacgnncatagcctnntttttttttttttttttttttttttttttt

SEQ ID NO: 5571 - DNA, 84 bp, Artificial
  Barcode component
  misc_feature (33)..(34): n is a, c, g, or t
  misc_feature (43)..(44): n is a, c, g, or t
  misc_feature (53)..(54): n is a, c, g, or t
tttttttaagcagtggtatcaacgcagagtacnnaatggacgnnatcgagacnntttttttttttttttttttttttttttttt

SEQ ID NO: 5572 - DNA, 84 bp, Artificial
  Barcode component
  misc_feature (33)..(34): n is a, c, g, or t
  misc_feature (43)..(44): n is a, c, g, or t
  misc_feature (53)..(54): n is a, c, g, or t
tttttttaagcagtggtatcaacgcagagtacnnaatggacgnnggaagagtnntttttttttttttttttttttttttttttt

SEQ ID NO: 5573 - DNA, 84 bp, Artificial
  Barcode component
  misc_feature (33)..(34): n is a, c, g, or t
  misc_feature (43)..(44): n is a, c, g, or t
  misc_feature (53)..(54): n is a, c, g, or t
tttttttaagcagtggtatcaacgcagagtacnnaatggacgnnccaagtagnntttttttttttttttttttttttttttttt

SEQ ID NO: 5574 - DNA, 84 bp, Artificial
  Barcode component
  misc_feature (33)..(34): n is a, c, g, or t
  misc_feature (43)..(44): n is a, c, g, or t
  misc_feature (53)..(54): n is a, c, g, or t
tttttttaagcagtggtatcaacgcagagtacnnaatggacgnnctgaacagnntttttttttttttttttttttttttttttt

SEQ ID NO: 5575 - DNA, 84 bp, Artificial
  Barcode component
  misc_feature (33)..(34): n is a, c, g, or t
  misc_feature (43)..(44): n is a, c, g, or t
  misc_feature (53)..(54): n is a, c, g, or t
tttttttaagcagtggtatcaacgcagagtacnnaatggacgnngtaggttcnntttttttttttttttttttttttttttttt

SEQ ID NO: 5576 - DNA, 84 bp, Artificial
  Barcode component
  misc_feature (33)..(34): n is a, c, g, or t
  misc_feature (43)..(44): n is a, c, g, or t
  misc_feature (53)..(54): n is a, c, g, or t
tttttttaagcagtggtatcaacgcagagtacnnaatggacgnngtatggacnntttttttttttttttttttttttttttttt

SEQ ID NO: 5577 - DNA, 84 bp, Artificial
  Barcode component
  misc_feature (33)..(34): n is a, c, g, or t
  misc_feature (43)..(44): n is a, c, g, or t
  misc_feature (53)..(54): n is a, c, g, or t
tttttttaagcagtggtatcaacgcagagtacnnaatggacgnntcgcaacanntttttttttttttttttttttttttttttt

SEQ ID NO: 5578 - DNA, 84 bp, Artificial
  Barcode component
  misc_feature (33)..(34): n is a, c, g, or t
  misc_feature (43)..(44): n is a, c, g, or t
  misc_feature (53)..(54): n is a, c, g, or t
tttttttaagcagtggtatcaacgcagagtacnnaatggacgnnccgctaatnntttttttttttttttttttttttttttttt

SEQ ID NO: 5579 - DNA, 84 bp, Artificial
  Barcode component
  misc_feature (33)..(34): n is a, c, g, or t
  misc_feature (43)..(44): n is a, c, g, or t
  misc_feature (53)..(54): n is a, c, g, or t
tttttttaagcagtggtatcaacgcagagtacnnaatggacgnngattcgcanntttttttttttttttttttttttttttttt

SEQ ID NO: 5580 - DNA, 84 bp, Artificial
  Barcode component
  misc_feature (33)..(34): n is a, c, g, or t
  misc_feature (43)..(44): n is a, c, g, or t
  misc_feature (53)..(54): n is a, c, g, or t
tttttttaagcagtggtatcaacgcagagtacnnaatggacgnncgatggaanntttttttttttttttttttttttttttttt

SEQ ID NO: 5581 - DNA, 84 bp, Artificial
  Barcode component
  misc_feature (33)..(34): n is a, c, g, or t
  misc_feature (43)..(44): n is a, c, g, or t
  misc_feature (53)..(54): n is a, c, g, or t
tttttttaagcagtggtatcaacgcagagtacnnaatggacgnnagcaagganntttttttttttttttttttttttttttttt

SEQ ID NO: 5582 - DNA, 84 bp, Artificial
  Barcode component
  misc_feature (33)..(34): n is a, c, g, or t
  misc_feature (43)..(44): n is a, c, g, or t
  misc_feature (53)..(54): n is a, c, g, or t
tttttttaagcagtggtatcaacgcagagtacnnaatggacgnncgtagcaanntttttttttttttttttttttttttttttt

SEQ ID NO: 5583 - DNA, 84 bp, Artificial
  Barcode component
  misc_feature (33)..(34): n is a, c, g, or t
  misc_feature (43)..(44): n is a, c, g, or t
  misc_feature (53)..(54): n is a, c, g, or t
tttttttaagcagtggtatcaacgcagagtacnnaatggacgnntggcagtanntttttttttttttttttttttttttttttt

SEQ ID NO: 5584 - DNA, 84 bp, Artificial
  Barcode component
  misc_feature (33)..(34): n is a, c, g, or t
  misc_feature (43)..(44): n is a, c, g, or t
  misc_feature (53)..(54): n is a, c, g, or t
tttttttaagcagtggtatcaacgcagagtacnnaatggacgnncggtagttnntttttttttttttttttttttttttttttt

SEQ ID NO: 5585 - DNA, 84 bp, Artificial
  Barcode component
  misc_feature (33)..(34): n is a, c, g, or t
  misc_feature (43)..(44): n is a, c, g, or t
  misc_feature (53)..(54): n is a, c, g, or t
tttttttaagcagtggtatcaacgcagagtacnnaatggacgnntgacttcgnntttttttttttttttttttttttttttttt

SEQ ID NO: 5586 - DNA, 84 bp, Artificial
  Barcode component
  misc_feature (33)..(34): n is a, c, g, or t
  misc_feature (43)..(44): n is a, c, g, or t
  misc_feature (53)..(54): n is a, c, g, or t
tttttttaagcagtggtatcaacgcagagtacnnaatggacgnngagtgcaanntttttttttttttttttttttttttttttt

SEQ ID NO: 5587 - DNA, 84 bp, Artificial
  Barcode component
  misc_feature (33)..(34): n is a, c, g, or t
  misc_feature (43)..(44): n is a, c, g, or t
  misc_feature (53)..(54): n is a, c, g, or t
tttttttaagcagtggtatcaacgcagagtacnnaatggacgnnacggtaacnntttttttttttttttttttttttttttttt

SEQ ID NO: 5588 - DNA, 84 bp, Artificial
  Barcode component
  misc_feature (33)..(34): n is a, c, g, or t
  misc_feature (43)..(44): n is a, c, g, or t
  misc_feature (53)..(54): n is a, c, g, or t
tttttttaagcagtggtatcaacgcagagtacnnaatggacgnnaagtggtgnntttttttttttttttttttttttttttttt

SEQ ID NO: 5589 - DNA, 84 bp, Artificial
  Barcode component
  misc_feature (33)..(34): n is a, c, g, or t
  misc_feature (43)..(44): n is a, c, g, or t
  misc_feature (53)..(54): n is a, c, g, or t
tttttttaagcagtggtatcaacgcagagtacnnaatggacgnnggagacaanntttttttttttttttttttttttttttttt

SEQ ID NO: 5590 - DNA, 84 bp, Artificial
  Barcode component
  misc_feature (33)..(34): n is a, c, g, or t
  misc_feature (43)..(44): n is a, c, g, or t
  misc_feature (53)..(54): n is a, c, g, or t
tttttttaagcagtggtatcaacgcagagtacnnaatggacgnntcaaggacnntttttttttttttttttttttttttttttt

SEQ ID NO: 5591 - DNA, 84 bp, Artificial
  Barcode component
  misc_feature (33)..(34): n is a, c, g, or t
  misc_feature (43)..(44): n is a, c, g, or t
  misc_feature (53)..(54): n is a, c, g, or t
tttttttaagcagtggtatcaacgcagagtacnnaatggacgnnaagagagcnntttttttttttttttttttttttttttttt

SEQ ID NO: 5592 - DNA, 84 bp, Artificial
  Barcode component
  misc_feature (33)..(34): n is a, c, g, or t
  misc_feature (43)..(44): n is a, c, g, or t
  misc_feature (53)..(54): n is a, c, g, or t
tttttttaagcagtggtatcaacgcagagtacnnaatggacgnncgagagatnntttttttttttttttttttttttttttttt

SEQ ID NO: 5593 - DNA, 84 bp, Artificial
  Barcode component
  misc_feature (33)..(34): n is a, c, g, or t
  misc_feature (43)..(44): n is a, c, g, or t
  misc_feature (53)..(54): n is a, c, g, or t
tttttttaagcagtggtatcaacgcagagtacnnaatggacgnnacagatggnntttttttttttttttttttttttttttttt

SEQ ID NO: 5594 - DNA, 84 bp, Artificial
  Barcode component
  misc_feature (33)..(34): n is a, c, g, or t
  misc_feature (43)..(44): n is a, c, g, or t
  misc_feature (53)..(54): n is a, c, g, or t
tttttttaagcagtggtatcaacgcagagtacnnaatggacgnnaggagtcanntttttttttttttttttttttttttttttt

SEQ ID NO: 5595 - DNA, 84 bp, Artificial
  Barcode component
  misc_feature (33)..(34): n is a, c, g, or t
  misc_feature (43)..(44): n is a, c, g, or t
  misc_feature (53)..(54): n is a, c, g, or t
tttttttaagcagtggtatcaacgcagagtacnnaatggacgnncgtgttacnntttttttttttttttttttttttttttttt

SEQ ID NO: 5596 - DNA, 84 bp, Artificial
  Barcode component
  misc_feature (33)..(34): n is a, c, g, or t
  misc_feature (43)..(44): n is a, c, g, or t
  misc_feature (53)..(54): n is a, c, g, or t
tttttttaagcagtggtatcaacgcagagtacnnaatggacgnntagtgtgcnntttttttttttttttttttttttttttttt

SEQ ID NO: 5597 - DNA, 84 bp, Artificial
  Barcode component
  misc_feature (33)..(34): n is a, c, g, or t
  misc_feature (43)..(44): n is a, c, g, or t
  misc_feature (53)..(54): n is a, c, g, or t
tttttttaagcagtggtatcaacgcagagtacnnaatggacgnnctcatgacnntttttttttttttttttttttttttttttt

SEQ ID NO: 5598 - DNA, 84 bp, Artificial
  Barcode component
  misc_feature (33)..(34): n is a, c, g, or t
  misc_feature (43)..(44): n is a, c, g, or t
  misc_feature (53)..(54): n is a, c, g, or t
tttttttaagcagtggtatcaacgcagagtacnnaatggacgnngtatccagnntttttttttttttttttttttttttttttt

SEQ ID NO: 5599 - DNA, 84 bp, Artificial
  Barcode component
  misc_feature (33)..(34): n is a, c, g, or t
  misc_feature (43)..(44): n is a, c, g, or t
  misc_feature (53)..(54): n is a, c, g, or t
tttttttaagcagtggtatcaacgcagagtacnnaatggacgnnacgcctatnntttttttttttttttttttttttttttttt

SEQ ID NO: 5600 - DNA, 84 bp, Artificial
  Barcode component
  misc_feature (33)..(34): n is a, c, g, or t
  misc_feature (43)..(44): n is a, c, g, or t
  misc_feature (53)..(54): n is a, c, g, or t
tttttttaagcagtggtatcaacgcagagtacnnaatggacgnnaacgacctnntttttttttttttttttttttttttttttt

SEQ ID NO: 5601 - DNA, 84 bp, Artificial
  Barcode component
  misc_feature (33)..(34): n is a, c, g, or t
  misc_feature (43)..(44): n is a, c, g, or t
  misc_feature (53)..(54): n is a, c, g, or t
tttttttaagcagtggtatcaacgcagagtacnnaatggacgnnatcaggctnntttttttttttttttttttttttttttttt

SEQ ID NO: 5602 - DNA, 84 bp, Artificial
  Barcode component
  misc_feature (33)..(34): n is a, c, g, or t
  misc_feature (43)..(44): n is a, c, g, or t
  misc_feature (53)..(54): n is a, c, g, or t
tttttttaagcagtggtatcaacgcagagtacnnaatggacgnncaagttcgnntttttttttttttttttttttttttttttt

SEQ ID NO: 5603 - DNA, 84 bp, Artificial
  Barcode component
  misc_feature (33)..(34): n is a, c, g, or t
  misc_feature (43)..(44): n is a, c, g, or t
  misc_feature (53)..(54): n is a, c, g, or t
tttttttaagcagtggtatcaacgcagagtacnnaatggacgnntagccaganntttttttttttttttttttttttttttttt

SEQ ID NO: 5604 - DNA, 84 bp, Artificial
  Barcode component
  misc_feature (33)..(34): n is a, c, g, or t
  misc_feature (43)..(44): n is a, c, g, or t
  misc_feature (53)..(54): n is a, c, g, or t
tttttttaagcagtggtatcaacgcagagtacnnaatggacgnncaatcacgnntttttttttttttttttttttttttttttt

SEQ ID NO: 5605 - DNA, 84 bp, Artificial
  Barcode component
  misc_feature (33)..(34): n is a, c, g, or t
  misc_feature (43)..(44): n is a, c, g, or t
  misc_feature (53)..(54): n is a, c, g, or t
tttttttaagcagtggtatcaacgcagagtacnnaatggacgnngcaacaagnntttttttttttttttttttttttttttttt

SEQ ID NO: 5606 - DNA, 84 bp, Artificial
  Barcode component
  misc_feature (33)..(34): n is a, c, g, or t
  misc_feature (43)..(44): n is a, c, g, or t
  misc_feature (53)..(54): n is a, c, g, or t
tttttttaagcagtggtatcaacgcagagtacnnaatggacgnncacgacaanntttttttttttttttttttttttttttttt

SEQ ID NO: 5607 - DNA, 84 bp, Artificial
  Barcode component
  misc_feature (33)..(34): n is a, c, g, or t
  misc_feature (43)..(44): n is a, c, g, or t
  misc_feature (53)..(54): n is a, c, g, or t
tttttttaagcagtggtatcaacgcagagtacnnaatggacgnntacggaganntttttttttttttttttttttttttttttt

SEQ ID NO: 5608 - DNA, 84 bp, Artificial
  Barcode component
  misc_feature (33)..(34): n is a, c, g, or t
  misc_feature (43)..(44): n is a, c, g, or t
  misc_feature (53)..(54): n is a, c, g, or t
tttttttaagcagtggtatcaacgcagagtacnnaatggacgnncgacaaganntttttttttttttttttttttttttttttt

SEQ ID NO: 5609 - DNA, 84 bp, Artificial
  Barcode component
  misc_feature (33)..(34): n is a, c, g, or t
  misc_feature (43)..(44): n is a, c, g, or t
  misc_feature (53)..(54): n is a, c, g, or t
tttttttaagcagtggtatcaacgcagagtacnnaatggacgnncgaagtganntttttttttttttttttttttttttttttt

SEQ ID NO: 5610 - DNA, 84 bp, Artificial
  Barcode component
  misc_feature (33)..(34): n is a, c, g, or t
  misc_feature (43)..(44): n is a, c, g, or t
  misc_feature (53)..(54): n is a, c, g, or t
tttttttaagcagtggtatcaacgcagagtacnnaatggacgnnagctggtanntttttttttttttttttttttttttttttt

SEQ ID NO: 5611 - DNA, 84 bp, Artificial
  Barcode component
  misc_feature (33)..(34): n is a, c, g, or t
  misc_feature (43)..(44): n is a, c, g, or t
  misc_feature (53)..(54): n is a, c, g, or t
tttttttaagcagtggtatcaacgcagagtacnnaatggacgnnaactaggcnntttttttttttttttttttttttttttttt

SEQ ID NO: 5612 - DNA, 84 bp, Artificial
  Barcode component
  misc_feature (33)..(34): n is a, c, g, or t
  misc_feature (43)..(44): n is a, c, g, or t
  misc_feature (53)..(54): n is a, c, g, or t
tttttttaagcagtggtatcaacgcagagtacnnaatggacgnncagcaagtnntttttttttttttttttttttttttttttt

SEQ ID NO: 5613 - DNA, 84 bp, Artificial
  Barcode component
  misc_feature (33)..(34): n is a, c, g, or t
  misc_feature (43)..(44): n is a, c, g, or t
  misc_feature (53)..(54): n is a, c, g, or t
tttttttaagcagtggtatcaacgcagagtacnnaatggacgnnacgaggtanntttttttttttttttttttttttttttttt

SEQ ID NO: 5614 - DNA, 84 bp, Artificial
  Barcode component
  misc_feature (33)..(34): n is a, c, g, or t
  misc_feature (43)..(44): n is a, c, g, or t
  misc_feature (53)..(54): n is a, c, g, or t
tttttttaagcagtggtatcaacgcagagtacnnaatggacgnncatcttccnntttttttttttttttttttttttttttttt

SEQ ID NO: 5615 - DNA, 84 bp, Artificial
  Barcode component
  misc_feature (33)..(34): n is a, c, g, or t
  misc_feature (43)..(44): n is a, c, g, or t
  misc_feature (53)..(54): n is a, c, g, or t
tttttttaagcagtggtatcaacgcagagtacnnaatggacgnncctgaatcnntttttttttttttttttttttttttttttt

SEQ ID NO: 5616 - DNA, 84 bp, Artificial
  Barcode component
  misc_feature (33)..(34): n is a, c, g, or t
  misc_feature (43)..(44): n is a, c, g, or t
  misc_feature (53)..(54): n is a, c, g, or t
tttttttaagcagtggtatcaacgcagagtacnnaatggacgnntgcagactnntttttttttttttttttttttttttttttt

SEQ ID NO: 5617 - DNA, 84 bp, Artificial
  Barcode component
  misc_feature (33)..(34): n is a, c, g, or t
  misc_feature (43)..(44): n is a, c, g, or t
  misc_feature (53)..(54): n is a, c, g, or t
tttttttaagcagtggtatcaacgcagagtacnnaatggacgnnagatgtggnntttttttttttttttttttttttttttttt

SEQ ID NO: 5618 - DNA, 84 bp, Artificial
  Barcode component
  misc_feature (33)..(34): n is a, c, g, or t
  misc_feature (43)..(44): n is a, c, g, or t
  misc_feature (53)..(54): n is a, c, g, or t
tttttttaagcagtggtatcaacgcagagtacnnaatggacgnnagttcgacnntttttttttttttttttttttttttttttt

SEQ ID NO: 5619 - DNA, 84 bp, Artificial
  Barcode component
  misc_feature (33)..(34): n is a, c, g, or t
  misc_feature (43)..(44): n is a, c, g, or t
  misc_feature (53)..(54): n is a, c, g, or t
tttttttaagcagtggtatcaacgcagagtacnnaatggacgnnacaacctcnntttttttttttttttttttttttttttttt

SEQ ID NO: 5620 - DNA, 84 bp, Artificial
  Barcode component
  misc_feature (33)..(34): n is a, c, g, or t
  misc_feature (43)..(44): n is a, c, g, or t
  misc_feature (53)..(54): n is a, c, g, or t
tttttttaagcagtggtatcaacgcagagtacnnaatggacgnncatggtagnntttttttttttttttttttttttttttttt

SEQ ID NO: 5621 - DNA, 84 bp, Artificial
  Barcode component
  misc_feature (33)..(34): n is a, c, g, or t
  misc_feature (43)..(44): n is a, c, g, or t
  misc_feature (53)..(54): n is a, c, g, or t
tttttttaagcagtggtatcaacgcagagtacnnaatggacgnncgtatctcnntttttttttttttttttttttttttttttt

SEQ ID NO: 5622 - DNA, 84 bp, Artificial
  Barcode component
  misc_feature (33)..(34): n is a, c, g, or t
  misc_feature (43)..(44): n is a, c, g, or t
  misc_feature (53)..(54): n is a, c, g, or t
tttttttaagcagtggtatcaacgcagagtacnnaatggacgnncctagttcnntttttttttttttttttttttttttttttt

SEQ ID NO: 5623 - DNA, 84 bp, Artificial
  Barcode component
  misc_feature (33)..(34): n is a, c, g, or t
  misc_feature (43)..(44): n is a, c, g, or t
  misc_feature (53)..(54): n is a, c, g, or t
tttttttaagcagtggtatcaacgcagagtacnnaatggacgnncaagagtcnntttttttttttttttttttttttttttttt

SEQ ID NO: 5624 - DNA, 84 bp, Artificial
  Barcode component
  misc_feature (33)..(34): n is a, c, g, or t
  misc_feature (43)..(44): n is a, c, g, or t
  misc_feature (53)..(54): n is a, c, g, or t
tttttttaagcagtggtatcaacgcagagtacnnatcggaagnnaatcggcanntttttttttttttttttttttttttttttt

SEQ ID NO: 5625 - DNA, 84 bp, Artificial
  Barcode component
  misc_feature (33)..(34): n is a, c, g, or t
  misc_feature (43)..(44): n is a, c, g, or t
  misc_feature (53)..(54): n is a, c, g, or t
tttttttaagcagtggtatcaacgcagagtacnnatcggaagnntacggcatnntttttttttttttttttttttttttttttt

SEQ ID NO: 5626 - DNA, 84 bp, Artificial
  Barcode component
  misc_feature (33)..(34): n is a, c, g, or t
  misc_feature (43)..(44): n is a, c, g, or t
  misc_feature (53)..(54): n is a, c, g, or t
tttttttaagcagtggtatcaacgcagagtacnnatcggaagnnttggatcgnntttttttttttttttttttttttttttttt

SEQ ID NO: 5627 - DNA, 84 bp, Artificial
  Barcode component
  misc_feature (33)..(34): n is a, c, g, or t
  misc_feature (43)..(44): n is a, c, g, or t
  misc_feature (53)..(54): n is a, c, g, or t
tttttttaagcagtggtatcaacgcagagtacnnatcggaagnntggaacganntttttttttttttttttttttttttttttt

SEQ ID NO: 5628 - DNA, 84 bp, Artificial
  Barcode component
  misc_feature (33)..(34): n is a, c, g, or t
  misc_feature (43)..(44): n is a, c, g, or t
  misc_feature (53)..(54): n is a, c, g, or t
tttttttaagcagtggtatcaacgcagagtacnnatcggaagnnggcaatcanntttttttttttttttttttttttttttttt

SEQ ID NO: 5629 - DNA, 84 bp, Artificial
  Barcode component
  misc_feature (33)..(34): n is a, c, g, or t
  misc_feature (43)..(44): n is a, c, g, or t
  misc_feature (53)..(54): n is a, c, g, or t
tttttttaagcagtggtatcaacgcagagtacnnatcggaagnngaatccganntttttttttttttttttttttttttttttt

SEQ ID NO: 5630 - DNA, 84 bp, Artificial
  Barcode component
  misc_feature (33)..(34): n is a, c, g, or t
  misc_feature (43)..(44): n is a, c, g, or t
  misc_feature (53)..(54): n is a, c, g, or t
tttttttaagcagtggtatcaacgcagagtacnnatcggaagnnttacggtgnntttttttttttttttttttttttttttttt

SEQ ID NO: 5631 - DNA, 84 bp, Artificial
  Barcode component
  misc_feature (33)..(34): n is a, c, g, or t
  misc_feature (43)..(44): n is a, c, g, or t
  misc_feature (53)..(54): n is a, c, g, or t
tttttttaagcagtggtatcaacgcagagtacnnatcggaagnncatatcggnntttttttttttttttttttttttttttttt

SEQ ID NO: 5632 - DNA, 84 bp, Artificial
  Barcode component
  misc_feature (33)..(34): n is a, c, g, or t
  misc_feature (43)..(44): n is a, c, g, or t
  misc_feature (53)..(54): n is a, c, g, or t
tttttttaagcagtggtatcaacgcagagtacnnatcggaagnncttcggtanntttttttttttttttttttttttttttttt

SEQ ID NO: 5633 - DNA, 84 bp, Artificial
  Barcode component
  misc_feature (33)..(34): n is a, c, g, or t
  misc_feature (43)..(44): n is a, c, g, or t
  misc_feature (53)..(54): n is a, c, g, or t
tttttttaagcagtggtatcaacgcagagtacnnatcggaagnntcctaacgnntttttttttttttttttttttttttttttt

SEQ ID NO: 5634 - DNA, 84 bp, Artificial
  Barcode component
  misc_feature (33)..(34): n is a, c, g, or t
  misc_feature (43)..(44): n is a, c, g, or t
  misc_feature (53)..(54): n is a, c, g, or t
tttttttaagcagtggtatcaacgcagagtacnnatcggaagnngtaagccanntttttttttttttttttttttttttttttt

SEQ ID NO: 5635 - DNA, 84 bp, Artificial
  Barcode component
  misc_feature (33)..(34): n is a, c, g, or t
  misc_feature (43)..(44): n is a, c, g, or t
  misc_feature (53)..(54): n is a, c, g, or t
tttttttaagcagtggtatcaacgcagagtacnnatcggaagnntaaggtggnntttttttttttttttttttttttttttttt

SEQ ID NO: 5636 - DNA, 84 bp, Artificial
  Barcode component
  misc_feature (33)..(34): n is a, c, g, or t
  misc_feature (43)..(44): n is a, c, g, or t
  misc_feature (53)..(54): n is a, c, g, or t
tttttttaagcagtggtatcaacgcagagtacnnatcggaagnnggtaagctnntttttttttttttttttttttttttttttt

SEQ ID NO: 5637 - DNA, 84 bp, Artificial
  Barcode component
  misc_feature (33)..(34): n is a, c, g, or t
  misc_feature (43)..(44): n is a, c, g, or t
  misc_feature (53)..(54): n is a, c, g, or t
tttttttaagcagtggtatcaacgcagagtacnnatcggaagnntgtgtcganntttttttttttttttttttttttttttttt

SEQ ID NO: 5638 - DNA, 84 bp, Artificial
  Barcode component
  misc_feature (33)..(34): n is a, c, g, or t
  misc_feature (43)..(44): n is a, c, g, or t
  misc_feature (53)..(54): n is a, c, g, or t
tttttttaagcagtggtatcaacgcagagtacnnatcggaagnngagcatganntttttttttttttttttttttttttttttt

SEQ ID NO: 5639 - DNA, 84 bp, Artificial
  Barcode component
  misc_feature (33)..(34): n is a, c, g, or t
  misc_feature (43)..(44): n is a, c, g, or t
  misc_feature (53)..(54): n is a, c, g, or t
tttttttaagcagtggtatcaacgcagagtacnnatcggaagnntcgaagtcnntttttttttttttttttttttttttttttt

SEQ ID NO: 5640 - DNA, 84 bp, Artificial
  Barcode component
  misc_feature (33)..(34): n is a, c, g, or t
  misc_feature (43)..(44): n is a, c, g, or t
  misc_feature (53)..(54): n is a, c, g, or t
tttttttaagcagtggtatcaacgcagagtacnnatcggaagnnggtgaacanntttttttttttttttttttttttttttttt

SEQ ID NO: 5641 - DNA, 84 bp, Artificial
  Barcode component
  misc_feature (33)..(34): n is a, c, g, or t
  misc_feature (43)..(44): n is a, c, g, or t
  misc_feature (53)..(54): n is a, c, g, or t
tttttttaagcagtggtatcaacgcagagtacnnatcggaagnnacatgcacnntttttttttttttttttttttttttttttt

SEQ ID NO: 5642 - DNA, 84 bp, Artificial
  Barcode component
  misc_feature (33)..(34): n is a, c, g, or t
  misc_feature (43)..(44): n is a, c, g, or t
  misc_feature (53)..(54): n is a, c, g, or t
tttttttaagcagtggtatcaacgcagagtacnnatcggaagnnccaacagtnntttttttttttttttttttttttttttttt

SEQ ID NO: 5643 - DNA, 84 bp, Artificial
  Barcode component
  misc_feature (33)..(34): n is a, c, g, or t
  misc_feature (43)..(44): n is a, c, g, or t
  misc_feature (53)..(54): n is a, c, g, or t
tttttttaagcagtggtatcaacgcagagtacnnatcggaagnnagaacagcnntttttttttttttttttttttttttttttt

SEQ ID NO: 5644 - DNA, 84 bp, Artificial
  Barcode component
  misc_feature (33)..(34): n is a, c, g, or t
  misc_feature (43)..(44): n is a, c, g, or t
  misc_feature (53)..(54): n is a, c, g, or t
tttttttaagcagtggtatcaacgcagagtacnnatcggaagnngaacacgtnntttttttttttttttttttttttttttttt

SEQ ID NO: 5645 - DNA, 84 bp, Artificial
  Barcode component
  misc_feature (33)..(34): n is a, c, g, or t
  misc_feature (43)..(44): n is a, c, g, or t
  misc_feature (53)..(54): n is a, c, g, or t
tttttttaagcagtggtatcaacgcagagtacnnatcggaagnnggtcttcanntttttttttttttttttttttttttttttt

SEQ ID NO: 5646 - DNA, 84 bp, Artificial
  Barcode component
  misc_feature (33)..(34): n is a, c, g, or t
  misc_feature (43)..(44): n is a, c, g, or t
  misc_feature (53)..(54): n is a, c, g, or t
tttttttaagcagtggtatcaacgcagagtacnnatcggaagnnaggttcagnntttttttttttttttttttttttttttttt

SEQ ID NO: 5647 - DNA, 84 bp, Artificial
  Barcode component
  misc_feature (33)..(34): n is a, c, g, or t
  misc_feature (43)..(44): n is a, c, g, or t
  misc_feature (53)..(54): n is a, c, g, or t
tttttttaagcagtggtatcaacgcagagtacnnatcggaagnnctagagcanntttttttttttttttttttttttttttttt

SEQ ID NO: 5648 - DNA, 84 bp, Artificial
  Barcode component
  misc_feature (33)..(34): n is a, c, g, or t
  misc_feature (43)..(44): n is a, c, g, or t
  misc_feature (53)..(54): n is a, c, g, or t
tttttttaagcagtggtatcaacgcagagtacnnatcggaagnncttctagcnntttttttttttttttttttttttttttttt

SEQ ID NO: 5649 - DNA, 84 bp, Artificial
  Barcode component
  misc_feature (33)..(34): n is a, c, g, or t
  misc_feature (43)..(44): n is a, c, g, or t
  misc_feature (53)..(54): n is a, c, g, or t
tttttttaagcagtggtatcaacgcagagtacnnatcggaagnngagtaacgnntttttttttttttttttttttttttttttt

SEQ ID NO: 5650 - DNA, 84 bp, Artificial
  Barcode component
  misc_feature (33)..(34): n is a, c, g, or t
  misc_feature (43)..(44): n is a, c, g, or t
  misc_feature (53)..(54): n is a, c, g, or t
tttttttaagcagtggtatcaacgcagagtacnnatcggaagnnctaagaggnntttttttttttttttttttttttttttttt

SEQ ID NO: 5651 - DNA, 84 bp, Artificial
  Barcode component
  misc_feature (33)..(34): n is a, c, g, or t
  misc_feature (43)..(44): n is a, c, g, or t
  misc_feature (53)..(54): n is a, c, g, or t
tttttttaagcagtggtatcaacgcagagtacnnatcggaagnnacgtgtagnntttttttttttttttttttttttttttttt

SEQ ID NO: 5652 - DNA, 84 bp, Artificial
  Barcode component
  misc_feature (33)..(34): n is a, c, g, or t
  misc_feature (43)..(44): n is a, c, g, or t
  misc_feature (53)..(54): n is a, c, g, or t
tttttttaagcagtggtatcaacgcagagtacnnatcggaagnnactacaggnntttttttttttttttttttttttttttttt

SEQ ID NO: 5653 - DNA, 84 bp, Artificial
  Barcode component
  misc_feature (33)..(34): n is a, c, g, or t
  misc_feature (43)..(44): n is a, c, g, or t
  misc_feature (53)..(54): n is a, c, g, or t
tttttttaagcagtggtatcaacgcagagtacnnatcggaagnntacaggtcnntttttttttttttttttttttttttttttt

SEQ ID NO: 5654 - DNA, 84 bp, Artificial
  Barcode component
  misc_feature (33)..(34): n is a, c, g, or t
  misc_feature (43)..(44): n is a, c, g, or t
  misc_feature (53)..(54): n is a, c, g, or t
tttttttaagcagtggtatcaacgcagagtacnnatcggaagnnctcacatgnntttttttttttttttttttttttttttttt

SEQ ID NO: 5655 - DNA, 84 bp, Artificial
  Barcode component
  misc_feature (33)..(34): n is a, c, g, or t
  misc_feature (43)..(44): n is a, c, g, or t
  misc_feature (53)..(54): n is a, c, g, or t
tttttttaagcagtggtatcaacgcagagtacnnatcggaagnnactaggagnntttttttttttttttttttttttttttttt

SEQ ID NO: 5656 - DNA, 84 bp, Artificial
  Barcode component
  misc_feature (33)..(34): n is a, c, g, or t
  misc_feature (43)..(44): n is a, c, g, or t
  misc_feature (53)..(54): n is a, c, g, or t
tttttttaagcagtggtatcaacgcagagtacnnatcggaagnnccatagganntttttttttttttttttttttttttttttt

SEQ ID NO: 5657 - DNA, 84 bp, Artificial
  Barcode component
  misc_feature (33)..(34): n is a, c, g, or t
  misc_feature (43)..(44): n is a, c, g, or t
  misc_feature (53)..(54): n is a, c, g, or t
tttttttaagcagtggtatcaacgcagagtacnnatcggaagnnggagaatcnntttttttttttttttttttttttttttttt

SEQ ID NO: 5658 - DNA, 84 bp, Artificial
  Barcode component
  misc_feature (33)..(34): n is a, c, g, or t
  misc_feature (43)..(44): n is a, c, g, or t
  misc_feature (53)..(54): n is a, c, g, or t
tttttttaagcagtggtatcaacgcagagtacnnatcggaagnngccaagaanntttttttttttttttttttttttttttttt

SEQ ID NO: 5659 - DNA, 84 bp, Artificial
  Barcode component
  misc_feature (33)..(34): n is a, c, g, or t
  misc_feature (43)..(44): n is a, c, g, or t
  misc_feature (53)..(54): n is a, c, g, or t
tttttttaagcagtggtatcaacgcagagtacnnatcggaagnnaaggcaagnntttttttttttttttttttttttttttttt

SEQ ID NO: 5660 - DNA, 84 bp, Artificial
  Barcode component
  misc_feature (33)..(34): n is a, c, g, or t
  misc_feature (43)..(44): n is a, c, g, or t
  misc_feature (53)..(54): n is a, c, g, or t
tttttttaagcagtggtatcaacgcagagtacnnatcggaagnnaatgtcgcnntttttttttttttttttttttttttttttt

SEQ ID NO: 5661 - DNA, 84 bp, Artificial
  Barcode component
  misc_feature (33)..(34): n is a, c, g, or t
  misc_feature (43)..(44): n is a, c, g, or t
  misc_feature (53)..(54): n is a, c, g, or t
tttttttaagcagtggtatcaacgcagagtacnnatcggaagnnatggaaccnntttttttttttttttttttttttttttttt

SEQ ID NO: 5662 - DNA, 84 bp, Artificial
  Barcode component
  misc_feature (33)..(34): n is a, c, g, or t
  misc_feature (43)..(44): n is a, c, g, or t
  misc_feature (53)..(54): n is a, c, g, or t
tttttttaagcagtggtatcaacgcagagtacnnatcggaagnnagaggcatnntttttttttttttttttttttttttttttt

SEQ ID NO: 5663 - DNA, 84 bp, Artificial
  Barcode component
  misc_feature (33)..(34): n is a, c, g, or t
  misc_feature (43)..(44): n is a, c, g, or t
  misc_feature (53)..(54): n is a, c, g, or t
tttttttaagcagtggtatcaacgcagagtacnnatcggaagnntgcatagcnntttttttttttttttttttttttttttttt

SEQ ID NO: 5664 - DNA, 84 bp, Artificial
  Barcode component
  misc_feature (33)..(34): n is a, c, g, or t
  misc_feature (43)..(44): n is a, c, g, or t
  misc_feature (53)..(54): n is a, c, g, or t
tttttttaagcagtggtatcaacgcagagtacnnatcggaagnnctaacgganntttttttttttttttttttttttttttttt

SEQ ID NO: 5665 - DNA, 84 bp, Artificial
  Barcode component
  misc_feature (33)..(34): n is a, c, g, or t
  misc_feature (43)..(44): n is a, c, g, or t
  misc_feature (53)..(54): n is a, c, g, or t
tttttttaagcagtggtatcaacgcagagtacnnatcggaagnntatcgaggnntttttttttttttttttttttttttttttt

SEQ ID NO: 5666 - DNA, 84 bp, Artificial
  Barcode component
  misc_feature (33)..(34): n is a, c, g, or t
  misc_feature (43)..(44): n is a, c, g, or t
  misc_feature (53)..(54): n is a, c, g, or t
tttttttaagcagtggtatcaacgcagagtacnnatcggaagnncatagcctnntttttttttttttttttttttttttttttt

SEQ ID NO: 5667 - DNA, 84 bp, Artificial
  Barcode component
  misc_feature (33)..(34): n is a, c, g, or t
  misc_feature (43)..(44): n is a, c, g, or t
  misc_feature (53)..(54): n is a, c, g, or t
tttttttaagcagtggtatcaacgcagagtacnnatcggaagnnatcgagacnntttttttttttttttttttttttttttttt

SEQ ID NO: 5668 - DNA, 84 bp, Artificial
  Barcode component
  misc_feature (33)..(34): n is a, c, g, or t
  misc_feature (43)..(44): n is a, c, g, or t
  misc_feature (53)..(54): n is a, c, g, or t
tttttttaagcagtggtatcaacgcagagtacnnatcggaagnnggaagagtnntttttttttttttttttttttttttttttt

SEQ ID NO: 5669 - DNA, 84 bp, Artificial
  Barcode component
  misc_feature (33)..(34): n is a, c, g, or t
  misc_feature (43)..(44): n is a, c, g, or t
  misc_feature (53)..(54): n is a, c, g, or t
tttttttaagcagtggtatcaacgcagagtacnnatcggaagnnccaagtagnntttttttttttttttttttttttttttttt

SEQ ID NO: 5670 - DNA, 84 bp, Artificial
  Barcode component
  misc_feature (33)..(34): n is a, c, g, or t
  misc_feature (43)..(44): n is a, c, g, or t
  misc_feature (53)..(54): n is a, c, g, or t
tttttttaagcagtggtatcaacgcagagtacnnatcggaagnnctgaacagnntttttttttttttttttttttttttttttt

SEQ ID NO: 5671 - DNA, 84 bp, Artificial
  Barcode component
  misc_feature (33)..(34): n is a, c, g, or t
  misc_feature (43)..(44): n is a, c, g, or t
  misc_feature (53)..(54): n is a, c, g, or t
tttttttaagcagtggtatcaacgcagagtacnnatcggaagnngtaggttcnntttttttttttttttttttttttttttttt

SEQ ID NO: 5672 - DNA, 84 bp, Artificial
  Barcode component
  misc_feature (33)..(34): n is a, c, g, or t
  misc_feature (43)..(44): n is a, c, g, or t
  misc_feature (53)..(54): n is a, c, g, or t
tttttttaagcagtggtatcaacgcagagtacnnatcggaagnngtatggacnntttttttttttttttttttttttttttttt

SEQ ID NO: 5673 - DNA, 84 bp, Artificial
  Barcode component
  misc_feature (33)..(34): n is a, c, g, or t
  misc_feature (43)..(44): n is a, c, g, or t
  misc_feature (53)..(54): n is a, c, g, or t
tttttttaagcagtggtatcaacgcagagtacnnatcggaagnntcgcaacanntttttttttttttttttttttttttttttt

SEQ ID NO: 5674 - DNA, 84 bp, Artificial
  Barcode component
  misc_feature (33)..(34): n is a, c, g, or t
  misc_feature (43)..(44): n is a, c, g, or t
  misc_feature (53)..(54): n is a, c, g, or t
tttttttaagcagtggtatcaacgcagagtacnnatcggaagnnccgctaatnntttttttttttttttttttttttttttttt

SEQ ID NO: 5675 - DNA, 84 bp, Artificial
  Barcode component
  misc_feature (33)..(34): n is a, c, g, or t
  misc_feature (43)..(44): n is a, c, g, or t
  misc_feature (53)..(54): n is a, c, g, or t
tttttttaagcagtggtatcaacgcagagtacnnatcggaagnngattcgcanntttttttttttttttttttttttttttttt

SEQ ID NO: 5676 - DNA, 84 bp, Artificial
  Barcode component
  misc_feature (33)..(34): n is a, c, g, or t
  misc_feature (43)..(44): n is a, c, g, or t
  misc_feature (53)..(54): n is a, c, g, or t
tttttttaagcagtggtatcaacgcagagtacnnatcggaagnncgatggaanntttttttttttttttttttttttttttttt

SEQ ID NO: 5677 - DNA, 84 bp, Artificial
  Barcode component
  misc_feature (33)..(34): n is a, c, g, or t
  misc_feature (43)..(44): n is a, c, g, or t
  misc_feature (53)..(54): n is a, c, g, or t
tttttttaagcagtggtatcaacgcagagtacnnatcggaagnnagcaagganntttttttttttttttttttttttttttttt

SEQ ID NO: 5678 - DNA, 84 bp, Artificial
  Barcode component
  misc_feature (33)..(34): n is a, c, g, or t
  misc_feature (43)..(44): n is a, c, g, or t
  misc_feature (53)..(54): n is a, c, g, or t
tttttttaagcagtggtatcaacgcagagtacnnatcggaagnncgtagcaanntttttttttttttttttttttttttttttt

SEQ ID NO: 5679 - DNA, 84 bp, Artificial
  Barcode component
  misc_feature (33)..(34): n is a, c, g, or t
  misc_feature (43)..(44): n is a, c, g, or t
  misc_feature (53)..(54): n is a, c, g, or t
tttttttaagcagtggtatcaacgcagagtacnnatcggaagnntggcagtanntttttttttttttttttttttttttttttt

SEQ ID NO: 5680 - DNA, 84 bp, Artificial
  Barcode component
  misc_feature (33)..(34): n is a, c, g, or t
  misc_feature (43)..(44): n is a, c, g, or t
  misc_feature (53)..(54): n is a, c, g, or t
tttttttaagcagtggtatcaacgcagagtacnnatcggaagnncggtagttnntttttttttttttttttttttttttttttt

SEQ ID NO: 5681 - DNA, 84 bp, Artificial
  Barcode component
  misc_feature (33)..(34): n is a, c, g, or t
  misc_feature (43)..(44): n is a, c, g, or t
  misc_feature (53)..(54): n is a, c, g, or t
tttttttaagcagtggtatcaacgcagagtacnnatcggaagnntgacttcgnntttttttttttttttttttttttttttttt

SEQ ID NO: 5682 - DNA, 84 bp, Artificial
  Barcode component
  misc_feature (33)..(34): n is a, c, g, or t
  misc_feature (43)..(44): n is a, c, g, or t
  misc_feature (53)..(54): n is a, c, g, or t
tttttttaagcagtggtatcaacgcagagtacnnatcggaagnngagtgcaanntttttttttttttttttttttttttttttt

SEQ ID NO: 5683 - DNA, 84 bp, Artificial
  Barcode component
  misc_feature (33)..(34): n is a, c, g, or t
  misc_feature (43)..(44): n is a, c, g, or t
  misc_feature (53)..(54): n is a, c, g, or t
tttttttaagcagtggtatcaacgcagagtacnnatcggaagnnacggtaacnntttttttttttttttttttttttttttttt

SEQ ID NO: 5684 - DNA, 84 bp, Artificial
  Barcode component
  misc_feature (33)..(34): n is a, c, g, or t
  misc_feature (43)..(44): n is a, c, g, or t
  misc_feature (53)..(54): n is a, c, g, or t
tttttttaagcagtggtatcaacgcagagtacnnatcggaagnnaagtggtgnntttttttttttttttttttttttttttttt

SEQ ID NO: 5685 - DNA, 84 bp, Artificial
  Barcode component
  misc_feature (33)..(34): n is a, c, g, or t
  misc_feature (43)..(44): n is a, c, g, or t
  misc_feature (53)..(54): n is a, c, g, or t
tttttttaagcagtggtatcaacgcagagtacnnatcggaagnnggagacaanntttttttttttttttttttttttttttttt

SEQ ID NO: 5686 - DNA, 84 bp, Artificial
  Barcode component
  misc_feature (33)..(34): n is a, c, g, or t
  misc_feature (43)..(44): n is a, c, g, or t
  misc_feature (53)..(54): n is a, c, g, or t
tttttttaagcagtggtatcaacgcagagtacnnatcggaagnntcaaggacnntttttttttttttttttttttttttttttt

SEQ ID NO: 5687 - DNA, 84 bp, Artificial
  Barcode component
  misc_feature (33)..(34): n is a, c, g, or t
  misc_feature (43)..(44): n is a, c, g, or t
  misc_feature (53)..(54): n is a, c, g, or t
tttttttaagcagtggtatcaacgcagagtacnnatcggaagnnaagagagcnntttttttttttttttttttttttttttttt

SEQ ID NO: 5688 - DNA, 84 bp, Artificial
  Barcode component
  misc_feature (33)..(34): n is a, c, g, or t
  misc_feature (43)..(44): n is a, c, g, or t
  misc_feature (53)..(54): n is a, c, g, or t
tttttttaagcagtggtatcaacgcagagtacnnatcggaagnncgagagatnntttttttttttttttttttttttttttttt

SEQ ID NO: 5689 - DNA, 84 bp, Artificial
  Barcode component
  misc_feature (33)..(34): n is a, c, g, or t
  misc_feature (43)..(44): n is a, c, g, or t
  misc_feature (53)..(54): n is a, c, g, or t
tttttttaagcagtggtatcaacgcagagtacnnatcggaagnnacagatggnntttttttttttttttttttttttttttttt

SEQ ID NO: 5690 - DNA, 84 bp, Artificial
  Barcode component
  misc_feature (33)..(34): n is a, c, g, or t
  misc_feature (43)..(44): n is a, c, g, or t
  misc_feature (53)..(54): n is a, c, g, or t
tttttttaagcagtggtatcaacgcagagtacnnatcggaagnnaggagtcanntttttttttttttttttttttttttttttt

SEQ ID NO: 5691 - DNA, 84 bp, Artificial
  Barcode component
  misc_feature (33)..(34): n is a, c, g, or t
  misc_feature (43)..(44): n is a, c, g, or t
  misc_feature (53)..(54): n is a, c, g, or t
tttttttaagcagtggtatcaacgcagagtacnnatcggaagnncgtgttacnntttttttttttttttttttttttttttttt

SEQ ID NO: 5692 - DNA, 84 bp, Artificial
  Barcode component
  misc_feature (33)..(34): n is a, c, g, or t
  misc_feature (43)..(44): n is a, c, g, or t
  misc_feature (53)..(54): n is a, c, g, or t
tttttttaagcagtggtatcaacgcagagtacnnatcggaagnntagtgtgcnntttttttttttttttttttttttttttttt

SEQ ID NO: 5693 - DNA, 84 bp, Artificial
  Barcode component
  misc_feature (33)..(34): n is a, c, g, or t
  misc_feature (43)..(44): n is a, c, g, or t
  misc_feature (53)..(54): n is a, c, g, or t
tttttttaagcagtggtatcaacgcagagtacnnatcggaagnnctcatgacnntttttttttttttttttttttttttttttt

SEQ ID NO: 5694 - DNA, 84 bp, Artificial
  Barcode component
  misc_feature (33)..(34): n is a, c, g, or t
  misc_feature (43)..(44): n is a, c, g, or t
  misc_feature (53)..(54): n is a, c, g, or t
tttttttaagcagtggtatcaacgcagagtacnnatcggaagnngtatccagnntttttttttttttttttttttttttttttt

SEQ ID NO: 5695 - DNA, 84 bp, Artificial
  Barcode component
  misc_feature (33)..(34): n is a, c, g, or t
  misc_feature (43)..(44): n is a, c, g, or t
  misc_feature (53)..(54): n is a, c, g, or t
tttttttaagcagtggtatcaacgcagagtacnnatcggaagnnacgcctatnntttttttttttttttttttttttttttttt

SEQ ID NO: 5696 - DNA, 84 bp, Artificial
  Barcode component
  misc_feature (33)..(34): n is a, c, g, or t
  misc_feature (43)..(44): n is a, c, g, or t
  misc_feature (53)..(54): n is a, c, g, or t
tttttttaagcagtggtatcaacgcagagtacnnatcggaagnnaacgacctnntttttttttttttttttttttttttttttt

SEQ ID NO: 5697 - DNA, 84 bp, Artificial
  Barcode component
  misc_feature (33)..(34): n is a, c, g, or t
  misc_feature (43)..(44): n is a, c, g, or t
  misc_feature (53)..(54): n is a, c, g, or t
tttttttaagcagtggtatcaacgcagagtacnnatcggaagnnatcaggctnntttttttttttttttttttttttttttttt

SEQ ID NO: 5698 - DNA, 84 bp, Artificial
  Barcode component
  misc_feature (33)..(34): n is a, c, g, or t
  misc_feature (43)..(44): n is a, c, g, or t
  misc_feature (53)..(54): n is a, c, g, or t
tttttttaagcagtggtatcaacgcagagtacnnatcggaagnncaagttcgnntttttttttttttttttttttttttttttt

SEQ ID NO: 5699 - DNA, 84 bp, Artificial
  Barcode component
  misc_feature (33)..(34): n is a, c, g, or t
  misc_feature (43)..(44): n is a, c, g, or t
  misc_feature (53)..(54): n is a, c, g, or t
tttttttaagcagtggtatcaacgcagagtacnnatcggaagnntagccaganntttttttttttttttttttttttttttttt

SEQ ID NO: 5700 - DNA, 84 bp, Artificial
  Barcode component
  misc_feature (33)..(34): n is a, c, g, or t
  misc_feature (43)..(44): n is a, c, g, or t
  misc_feature (53)..(54): n is a, c, g, or t
tttttttaagcagtggtatcaacgcagagtacnnatcggaagnncaatcacgnntttttttttttttttttttttttttttttt

SEQ ID NO: 5701 - DNA, 84 bp, Artificial
  Barcode component
  misc_feature (33)..(34): n is a, c, g, or t
  misc_feature (43)..(44): n is a, c, g, or t
  misc_feature (53)..(54): n is a, c, g, or t
tttttttaagcagtggtatcaacgcagagtacnnatcggaagnngcaacaagnntttttttttttttttttttttttttttttt

SEQ ID NO: 5702 - DNA, 84 bp, Artificial
  Barcode component
  misc_feature (33)..(34): n is a, c, g, or t
  misc_feature (43)..(44): n is a, c, g, or t
  misc_feature (53)..(54): n is a, c, g, or t
tttttttaagcagtggtatcaacgcagagtacnnatcggaagnncacgacaanntttttttttttttttttttttttttttttt

SEQ ID NO: 5703 - DNA, 84 bp, Artificial
  Barcode component
  misc_feature (33)..(34): n is a, c, g, or t
  misc_feature (43)..(44): n is a, c, g, or t
  misc_feature (53)..(54): n is a, c, g, or t
tttttttaagcagtggtatcaacgcagagtacnnatcggaagnntacggaganntttttttttttttttttttttttttttttt

SEQ ID NO: 5704 - DNA, 84 bp, Artificial
  Barcode component
  misc_feature (33)..(34): n is a, c, g, or t
  misc_feature (43)..(44): n is a, c, g, or t
  misc_feature (53)..(54): n is a, c, g, or t
tttttttaagcagtggtatcaacgcagagtacnnatcggaagnncgacaaganntttttttttttttttttttttttttttttt

SEQ ID NO: 5705 - DNA, 84 bp, Artificial
  Barcode component
  misc_feature (33)..(34): n is a, c, g, or t
  misc_feature (43)..(44): n is a, c, g, or t
  misc_feature (53)..(54): n is a, c, g, or t
tttttttaagcagtggtatcaacgcagagtacnnatcggaagnncgaagtganntttttttttttttttttttttttttttttt

SEQ ID NO: 5706 - DNA, 84 bp, Artificial
  Barcode component
  misc_feature (33)..(34): n is a, c, g, or t
  misc_feature (43)..(44): n is a, c, g, or t
  misc_feature (53)..(54): n is a, c, g, or t
tttttttaagcagtggtatcaacgcagagtacnnatcggaagnnagctggtanntttttttttttttttttttttttttttttt

SEQ ID NO: 5707 - DNA, 84 bp, Artificial
  Barcode component
  misc_feature (33)..(34): n is a, c, g, or t
  misc_feature (43)..(44): n is a, c, g, or t
  misc_feature (53)..(54): n is a, c, g, or t
tttttttaagcagtggtatcaacgcagagtacnnatcggaagnnaactaggcnntttttttttttttttttttttttttttttt

SEQ ID NO: 5708 - DNA, 84 bp, Artificial
  Barcode component
  misc_feature (33)..(34): n is a, c, g, or t
  misc_feature (43)..(44): n is a, c, g, or t
  misc_feature (53)..(54): n is a, c, g, or t
tttttttaagcagtggtatcaacgcagagtacnnatcggaagnncagcaagtnntttttttttttttttttttttttttttttt

SEQ ID NO: 5709 - DNA, 84 bp, Artificial
  Barcode component
  misc_feature (33)..(34): n is a, c, g, or t
  misc_feature (43)..(44): n is a, c, g, or t
  misc_feature (53)..(54): n is a, c, g, or t
tttttttaagcagtggtatcaacgcagagtacnnatcggaagnnacgaggtanntttttttttttttttttttttttttttttt

SEQ ID NO: 5710 - DNA, 84 bp, Artificial
  Barcode component
  misc_feature (33)..(34): n is a, c, g, or t
  misc_feature (43)..(44): n is a, c, g, or t
  misc_feature (53)..(54): n is a, c, g, or t
tttttttaagcagtggtatcaacgcagagtacnnatcggaagnncatcttccnntttttttttttttttttttttttttttttt

SEQ ID NO: 5711 - DNA, 84 bp, Artificial
  Barcode component
  misc_feature (33)..(34): n is a, c, g, or t
  misc_feature (43)..(44): n is a, c, g, or t
  misc_feature (53)..(54): n is a, c, g, or t
tttttttaagcagtggtatcaacgcagagtacnnatcggaagnncctgaatcnntttttttttttttttttttttttttttttt

SEQ ID NO: 5712 - DNA, 84 bp, Artificial
  Barcode component
  misc_feature (33)..(34): n is a, c, g, or t
  misc_feature (43)..(44): n is a, c, g, or t
  misc_feature (53)..(54): n is a, c, g, or t
tttttttaagcagtggtatcaacgcagagtacnnatcggaagnntgcagactnntttttttttttttttttttttttttttttt

SEQ ID NO: 5713 - DNA, 84 bp, Artificial
  Barcode component
  misc_feature (33)..(34): n is a, c, g, or t
  misc_feature (43)..(44): n is a, c, g, or t
  misc_feature (53)..(54): n is a, c, g, or t
tttttttaagcagtggtatcaacgcagagtacnnatcggaagnnagatgtggnntttttttttttttttttttttttttttttt

SEQ ID NO: 5714 - DNA, 84 bp, Artificial
  Barcode component
  misc_feature (33)..(34): n is a, c, g, or t
  misc_feature (43)..(44): n is a, c, g, or t
  misc_feature (53)..(54): n is a, c, g, or t
tttttttaagcagtggtatcaacgcagagtacnnatcggaagnnagttcgacnntttttttttttttttttttttttttttttt

SEQ ID NO: 5715 - DNA, 84 bp, Artificial
  Barcode component
  misc_feature (33)..(34): n is a, c, g, or t
  misc_feature (43)..(44): n is a, c, g, or t
  misc_feature (53)..(54): n is a, c, g, or t
tttttttaagcagtggtatcaacgcagagtacnnatcggaagnnacaacctcnntttttttttttttttttttttttttttttt

SEQ ID NO: 5716 - DNA, 84 bp, Artificial
  Barcode component
  misc_feature (33)..(34): n is a, c, g, or t
  misc_feature (43)..(44): n is a, c, g, or t
  misc_feature (53)..(54): n is a, c, g, or t
tttttttaagcagtggtatcaacgcagagtacnnatcggaagnncatggtagnntttttttttttttttttttttttttttttt

SEQ ID NO: 5717 - DNA, 84 bp, Artificial
  Barcode component
  misc_feature (33)..(34): n is a, c, g, or t
  misc_feature (43)..(44): n is a, c, g, or t
  misc_feature (53)..(54): n is a, c, g, or t
tttttttaagcagtggtatcaacgcagagtacnnatcggaagnncgtatctcnntttttttttttttttttttttttttttttt

SEQ ID NO: 5718 - DNA, 84 bp, Artificial
  Barcode component
  misc_feature (33)..(34): n is a, c, g, or t
  misc_feature (43)..(44): n is a, c, g, or t
  misc_feature (53)..(54): n is a, c, g, or t
tttttttaagcagtggtatcaacgcagagtacnnatcggaagnncctagttcnntttttttttttttttttttttttttttttt

SEQ ID NO: 5719 - DNA, 84 bp, Artificial
  Barcode component
  misc_feature (33)..(34): n is a, c, g, or t
  misc_feature (43)..(44): n is a, c, g, or t
  misc_feature (53)..(54): n is a, c, g, or t
tttttttaagcagtggtatcaacgcagagtacnnatcggaagnncaagagtcnntttttttttttttttttttttttttttttt

SEQ ID NO: 5720 - DNA, 84 bp, Artificial
  Barcode component
  misc_feature (33)..(34): n is a, c, g, or t
  misc_feature (43)..(44): n is a, c, g, or t
  misc_feature (53)..(54): n is a, c, g, or t
tttttttaagcagtggtatcaacgcagagtacnnaagacggannaatcggcanntttttttttttttttttttttttttttttt

SEQ ID NO: 5721 - DNA, 84 bp, Artificial
  Barcode component
  misc_feature (33)..(34): n is a, c, g, or t
  misc_feature (43)..(44): n is a, c, g, or t
  misc_feature (53)..(54): n is a, c, g, or t
tttttttaagcagtggtatcaacgcagagtacnnaagacgganntacggcatnntttttttttttttttttttttttttttttt

SEQ ID NO: 5722 - DNA, 84 bp, Artificial
  Barcode component
  misc_feature (33)..(34): n is a, c, g, or t
  misc_feature (43)..(44): n is a, c, g, or t
  misc_feature (53)..(54): n is a, c, g, or t
tttttttaagcagtggtatcaacgcagagtacnnaagacggannttggatcgnntttttttttttttttttttttttttttttt

SEQ ID NO: 5723 - DNA, 84 bp, Artificial
  Barcode component
  misc_feature (33)..(34): n is a, c, g, or t
  misc_feature (43)..(44): n is a, c, g, or t
  misc_feature (53)..(54): n is a, c, g, or t
tttttttaagcagtggtatcaacgcagagtacnnaagacgganntggaacganntttttttttttttttttttttttttttttt

SEQ ID NO: 5724 - DNA, 84 bp, Artificial
  Barcode component
  misc_feature (33)..(34): n is a, c, g, or t
  misc_feature (43)..(44): n is a, c, g, or t
  misc_feature (53)..(54): n is a, c, g, or t
tttttttaagcagtggtatcaacgcagagtacnnaagacggannggcaatcanntttttttttttttttttttttttttttttt

SEQ ID NO: 5725 - DNA, 84 bp, Artificial
  Barcode component
  misc_feature (33)..(34): n is a, c, g, or t
  misc_feature (43)..(44): n is a, c, g, or t
  misc_feature (53)..(54): n is a, c, g, or t
tttttttaagcagtggtatcaacgcagagtacnnaagacgganngaatccganntttttttttttttttttttttttttttttt

SEQ ID NO: 5726 - DNA, 84 bp, Artificial
  Barcode component
  misc_feature (33)..(34): n is a, c, g, or t
  misc_feature (43)..(44): n is a, c, g, or t
  misc_feature (53)..(54): n is a, c, g, or t
tttttttaagcagtggtatcaacgcagagtacnnaagacggannttacggtgnntttttttttttttttttttttttttttttt

SEQ ID NO: 5727 - DNA, 84 bp, Artificial
  Barcode component
  misc_feature (33)..(34): n is a, c, g, or t
  misc_feature (43)..(44): n is a, c, g, or t
  misc_feature (53)..(54): n is a, c, g, or t
tttttttaagcagtggtatcaacgcagagtacnnaagacgganncatatcggnntttttttttttttttttttttttttttttt

SEQ ID NO: 5728 - DNA, 84 bp, Artificial
  Barcode component
  misc_feature (33)..(34): n is a, c, g, or t
  misc_feature (43)..(44): n is a, c, g, or t
  misc_feature (53)..(54): n is a, c, g, or t
tttttttaagcagtggtatcaacgcagagtacnnaagacgganncttcggtanntttttttttttttttttttttttttttttt

SEQ ID NO: 5729 - DNA, 84 bp, Artificial
  Barcode component
  misc_feature (33)..(34): n is a, c, g, or t
  misc_feature (43)..(44): n is a, c, g, or t
  misc_feature (53)..(54): n is a, c, g, or t
tttttttaagcagtggtatcaacgcagagtacnnaagacgganntcctaacgnntttttttttttttttttttttttttttttt

SEQ ID NO: 5730 - DNA, 84 bp, Artificial
  Barcode component
  misc_feature (33)..(34): n is a, c, g, or t
  misc_feature (43)..(44): n is a, c, g, or t
  misc_feature (53)..(54): n is a, c, g, or t
tttttttaagcagtggtatcaacgcagagtacnnaagacgganngtaagccanntttttttttttttttttttttttttttttt

SEQ ID NO: 5731 - DNA, 84 bp, Artificial
  Barcode component
  misc_feature (33)..(34): n is a, c, g, or t
  misc_feature (43)..(44): n is a, c, g, or t
  misc_feature (53)..(54): n is a, c, g, or t
tttttttaagcagtggtatcaacgcagagtacnnaagacgganntaaggtggnntttttttttttttttttttttttttttttt

SEQ ID NO: 5732 - DNA, 84 bp, Artificial
  Barcode component
  misc_feature (33)..(34): n is a, c, g, or t
  misc_feature (43)..(44): n is a, c, g, or t
  misc_feature (53)..(54): n is a, c, g, or t
tttttttaagcagtggtatcaacgcagagtacnnaagacggannggtaagctnntttttttttttttttttttttttttttttt

SEQ ID NO: 5733 - DNA, 84 bp, Artificial
  Barcode component
  misc_feature (33)..(34): n is a, c, g, or t
  misc_feature (43)..(44): n is a, c, g, or t
  misc_feature (53)..(54): n is a, c, g, or t
tttttttaagcagtggtatcaacgcagagtacnnaagacgganntgtgtcganntttttttttttttttttttttttttttttt

SEQ ID NO: 5734 - DNA, 84 bp, Artificial
  Barcode component
  misc_feature (33)..(34): n is a, c, g, or t
  misc_feature (43)..(44): n is a, c, g, or t
  misc_feature (53)..(54): n is a, c, g, or t
tttttttaagcagtggtatcaacgcagagtacnnaagacgganngagcatganntttttttttttttttttttttttttttttt

SEQ ID NO: 5735 - DNA, 84 bp, Artificial
  Barcode component
  misc_feature (33)..(34): n is a, c, g, or t
  misc_feature (43)..(44): n is a, c, g, or t
  misc_feature (53)..(54): n is a, c, g, or t
tttttttaagcagtggtatcaacgcagagtacnnaagacgganntcgaagtcnntttttttttttttttttttttttttttttt

SEQ ID NO: 5736 - DNA, 84 bp, Artificial
  Barcode component
  misc_feature (33)..(34): n is a, c, g, or t
  misc_feature (43)..(44): n is a, c, g, or t
  misc_feature (53)..(54): n is a, c, g, or t
tttttttaagcagtggtatcaacgcagagtacnnaagacggannggtgaacanntttttttttttttttttttttttttttttt

SEQ ID NO: 5737 - DNA, 84 bp, Artificial
  Barcode component
  misc_feature (33)..(34): n is a, c, g, or t
  misc_feature (43)..(44): n is a, c, g, or t
  misc_feature (53)..(54): n is a, c, g, or t
tttttttaagcagtggtatcaacgcagagtacnnaagacggannacatgcacnntttttttttttttttttttttttttttttt

SEQ ID NO: 5738 - DNA, 84 bp, Artificial
  Barcode component
  misc_feature (33)..(34): n is a, c, g, or t
  misc_feature (43)..(44): n is a, c, g, or t
  misc_feature (53)..(54): n is a, c, g, or t
tttttttaagcagtggtatcaacgcagagtacnnaagacggannccaacagtnntttttttttttttttttttttttttttttt

SEQ ID NO: 5739 - DNA, 84 bp, Artificial
  Barcode component
  misc_feature (33)..(34): n is a, c, g, or t
  misc_feature (43)..(44): n is a, c, g, or t
  misc_feature (53)..(54): n is a, c, g, or t
tttttttaagcagtggtatcaacgcagagtacnnaagacggannagaacagcnntttttttttttttttttttttttttttttt

SEQ ID NO: 5740 - DNA, 84 bp, Artificial
  Barcode component
  misc_feature (33)..(34): n is a, c, g, or t
  misc_feature (43)..(44): n is a, c, g, or t
  misc_feature (53)..(54): n is a, c, g, or t
tttttttaagcagtggtatcaacgcagagtacnnaagacgganngaacacgtnntttttttttttttttttttttttttttttt

SEQ ID NO: 5741 - DNA, 84 bp, Artificial
  Barcode component
  misc_feature (33)..(34): n is a, c, g, or t
  misc_feature (43)..(44): n is a, c, g, or t
  misc_feature (53)..(54): n is a, c, g, or t
tttttttaagcagtggtatcaacgcagagtacnnaagacggannggtcttcanntttttttttttttttttttttttttttttt

SEQ ID NO: 5742 - DNA, 84 bp, Artificial
  Barcode component
  misc_feature (33)..(34): n is a, c, g, or t
  misc_feature (43)..(44): n is a, c, g, or t
  misc_feature (53)..(54): n is a, c, g, or t
tttttttaagcagtggtatcaacgcagagtacnnaagacggannaggttcagnntttttttttttttttttttttttttttttt

SEQ ID NO: 5743 - DNA, 84 bp, Artificial
  Barcode component
  misc_feature (33)..(34): n is a, c, g, or t
  misc_feature (43)..(44): n is a, c, g, or t
  misc_feature (53)..(54): n is a, c, g, or t
tttttttaagcagtggtatcaacgcagagtacnnaagacggannctagagcanntttttttttttttttttttttttttttttt

SEQ ID NO: 5744 - DNA, 84 bp, Artificial
  Barcode component
  misc_feature (33)..(34): n is a, c, g, or t
  misc_feature (43)..(44): n is a, c, g, or t
  misc_feature (53)..(54): n is a, c, g, or t
tttttttaagcagtggtatcaacgcagagtacnnaagacgganncttctagcnntttttttttttttttttttttttttttttt

SEQ ID NO: 5745 - DNA, 84 bp, Artificial
  Barcode component
  misc_feature (33)..(34): n is a, c, g, or t
  misc_feature (43)..(44): n is a, c, g, or t
  misc_feature (53)..(54): n is a, c, g, or t
tttttttaagcagtggtatcaacgcagagtacnnaagacgganngagtaacgnntttttttttttttttttttttttttttttt

SEQ ID NO: 5746 - DNA, 84 bp, Artificial
  Barcode component
  misc_feature (33)..(34): n is a, c, g, or t
  misc_feature (43)..(44): n is a, c, g, or t
  misc_feature (53)..(54): n is a, c, g, or t
tttttttaagcagtggtatcaacgcagagtacnnaagacggannctaagaggnntttttttttttttttttttttttttttttt

SEQ ID NO: 5747 - DNA, 84 bp, Artificial
  Barcode component
  misc_feature (33)..(34): n is a, c, g, or t
  misc_feature (43)..(44): n is a, c, g, or t
  misc_feature (53)..(54): n is a, c, g, or t
tttttttaagcagtggtatcaacgcagagtacnnaagacggannacgtgtagnntttttttttttttttttttttttttttttt

SEQ ID NO: 5748 - DNA, 84 bp, Artificial
  Barcode component
  misc_feature (33)..(34): n is a, c, g, or t
  misc_feature (43)..(44): n is a, c, g, or t
  misc_feature (53)..(54): n is a, c, g, or t
tttttttaagcagtggtatcaacgcagagtacnnaagacggannactacaggnntttttttttttttttttttttttttttttt

SEQ ID NO: 5749 - DNA, 84 bp, Artificial
  Barcode component
  misc_feature (33)..(34): n is a, c, g, or t
  misc_feature (43)..(44): n is a, c, g, or t
  misc_feature (53)..(54): n is a, c, g, or t
tttttttaagcagtggtatcaacgcagagtacnnaagacgganntacaggtcnntttttttttttttttttttttttttttttt

SEQ ID NO: 5750 - DNA, 84 bp, Artificial
  Barcode component
  misc_feature (33)..(34): n is a, c, g, or t
  misc_feature (43)..(44): n is a, c, g, or t
  misc_feature (53)..(54): n is a, c, g, or t
tttttttaagcagtggtatcaacgcagagtacnnaagacggannctcacatgnntttttttttttttttttttttttttttttt

SEQ ID NO: 5751 - DNA, 84 bp, Artificial
  Barcode component
  misc_feature (33)..(34): n is a, c, g, or t
  misc_feature (43)..(44): n is a, c, g, or t
  misc_feature (53)..(54): n is a, c, g, or t
tttttttaagcagtggtatcaacgcagagtacnnaagacggannactaggagnntttttttttttttttttttttttttttttt

SEQ ID NO: 5752 - DNA, 84 bp, Artificial
  Barcode component
  misc_feature (33)..(34): n is a, c, g, or t
  misc_feature (43)..(44): n is a, c, g, or t
  misc_feature (53)..(54): n is a, c, g, or t
tttttttaagcagtggtatcaacgcagagtacnnaagacggannccatagganntttttttttttttttttttttttttttttt

SEQ ID NO: 5753 - DNA, 84 bp, Artificial
  Barcode component
  misc_feature (33)..(34): n is a, c, g, or t
  misc_feature (43)..(44): n is a, c, g, or t
  misc_feature (53)..(54): n is a, c, g, or t
tttttttaagcagtggtatcaacgcagagtacnnaagacggannggagaatcnntttttttttttttttttttttttttttttt

SEQ ID NO: 5754 - DNA, 84 bp, Artificial
  Barcode component
  misc_feature (33)..(34): n is a, c, g, or t
  misc_feature (43)..(44): n is a, c, g, or t
  misc_feature (53)..(54): n is a, c, g, or t
tttttttaagcagtggtatcaacgcagagtacnnaagacgganngccaagaanntttttttttttttttttttttttttttttt

SEQ ID NO: 5755 - DNA, 84 bp, Artificial
  Barcode component
  misc_feature (33)..(34): n is a, c, g, or t
  misc_feature (43)..(44): n is a, c, g, or t
  misc_feature (53)..(54): n is a, c, g, or t
tttttttaagcagtggtatcaacgcagagtacnnaagacggannaaggcaagnntttttttttttttttttttttttttttttt

SEQ ID NO: 5756 - DNA, 84 bp, Artificial
  Barcode component
  misc_feature (33)..(34): n is a, c, g, or t
  misc_feature (43)..(44): n is a, c, g, or t
  misc_feature (53)..(54): n is a, c, g, or t
tttttttaagcagtggtatcaacgcagagtacnnaagacggannaatgtcgcnntttttttttttttttttttttttttttttt

SEQ ID NO: 5757 - DNA, 84 bp, Artificial
  Barcode component
  misc_feature (33)..(34): n is a, c, g, or t
  misc_feature (43)..(44): n is a, c, g, or t
  misc_feature (53)..(54): n is a, c, g, or t
tttttttaagcagtggtatcaacgcagagtacnnaagacggannatggaaccnntttttttttttttttttttttttttttttt

SEQ ID NO: 5758 - DNA, 84 bp, Artificial
  Barcode component
  misc_feature (33)..(34): n is a, c, g, or t
  misc_feature (43)..(44): n is a, c, g, or t
  misc_feature (53)..(54): n is a, c, g, or t
tttttttaagcagtggtatcaacgcagagtacnnaagacggannagaggcatnntttttttttttttttttttttttttttttt

SEQ ID NO: 5759 - DNA, 84 bp, Artificial
  Barcode component
  misc_feature (33)..(34): n is a, c, g, or t
  misc_feature (43)..(44): n is a, c, g, or t
  misc_feature (53)..(54): n is a, c, g, or t
tttttttaagcagtggtatcaacgcagagtacnnaagacgganntgcatagcnntttttttttttttttttttttttttttttt

SEQ ID NO: 5760 - DNA, 84 bp, Artificial
  Barcode component
  misc_feature (33)..(34): n is a, c, g, or t
  misc_feature (43)..(44): n is a, c, g, or t
  misc_feature (53)..(54): n is a, c, g, or t
tttttttaagcagtggtatcaacgcagagtacnnaagacggannctaacgganntttttttttttttttttttttttttttttt

SEQ ID NO: 5761 - DNA, 84 bp, Artificial
  Barcode component
  misc_feature (33)..(34): n is a, c, g, or t
  misc_feature (43)..(44): n is a, c, g, or t
  misc_feature (53)..(54): n is a, c, g, or t
tttttttaagcagtggtatcaacgcagagtacnnaagacgganntatcgaggnntttttttttttttttttttttttttttttt

SEQ ID NO: 5762 - DNA, 84 bp, Artificial
  Barcode component
  misc_feature (33)..(34): n is a, c, g, or t
  misc_feature (43)..(44): n is a, c, g, or t
  misc_feature (53)..(54): n is a, c, g, or t
tttttttaagcagtggtatcaacgcagagtacnnaagacgganncatagcctnntttttttttttttttttttttttttttttt

SEQ ID NO: 5763 - DNA, 84 bp, Artificial
  Barcode component
  misc_feature (33)..(34): n is a, c, g, or t
  misc_feature (43)..(44): n is a, c, g, or t
  misc_feature (53)..(54): n is a, c, g, or t
tttttttaagcagtggtatcaacgcagagtacnnaagacggannatcgagacnntttttttttttttttttttttttttttttt

SEQ ID NO: 5764 - DNA, 84 bp, Artificial
  Barcode component
  misc_feature (33)..(34): n is a, c, g, or t
  misc_feature (43)..(44): n is a, c, g, or t
  misc_feature (53)..(54): n is a, c, g, or t
tttttttaagcagtggtatcaacgcagagtacnnaagacggannggaagagtnntttttttttttttttttttttttttttttt

SEQ ID NO: 5765 - DNA, 84 bp, Artificial
  Barcode component
  misc_feature (33)..(34): n is a, c, g, or t
  misc_feature (43)..(44): n is a, c, g, or t
  misc_feature (53)..(54): n is a, c, g, or t
tttttttaagcagtggtatcaacgcagagtacnnaagacggannccaagtagnntttttttttttttttttttttttttttttt

SEQ ID NO: 5766 - DNA, 84 bp, Artificial
  Barcode component
  misc_feature (33)..(34): n is a, c, g, or t
  misc_feature (43)..(44): n is a, c, g, or t
  misc_feature (53)..(54): n is a, c, g, or t
tttttttaagcagtggtatcaacgcagagtacnnaagacggannctgaacagnntttttttttttttttttttttttttttttt

SEQ ID NO: 5767 - DNA, 84 bp, Artificial
  Barcode component
  misc_feature (33)..(34): n is a, c, g, or t
  misc_feature (43)..(44): n is a, c, g, or t
  misc_feature (53)..(54): n is a, c, g, or t
tttttttaagcagtggtatcaacgcagagtacnnaagacgganngtaggttcnntttttttttttttttttttttttttttttt

SEQ ID NO: 5768 - DNA, 84 bp, Artificial
  Barcode component
  misc_feature (33)..(34): n is a, c, g, or t
  misc_feature (43)..(44): n is a, c, g, or t
  misc_feature (53)..(54): n is a, c, g, or t
tttttttaagcagtggtatcaacgcagagtacnnaagacgganngtatggacnntttttttttttttttttttttttttttttt

SEQ ID NO: 5769 - DNA, 84 bp, Artificial
  Barcode component
  misc_feature (33)..(34): n is a, c, g, or t
  misc_feature (43)..(44): n is a, c, g, or t
  misc_feature (53)..(54): n is a, c, g, or t
tttttttaagcagtggtatcaacgcagagtacnnaagacgganntcgcaacanntttttttttttttttttttttttttttttt

SEQ ID NO: 5770 - DNA, 84 bp, Artificial
  Barcode component
  misc_feature (33)..(34): n is a, c, g, or t
  misc_feature (43)..(44): n is a, c, g, or t
  misc_feature (53)..(54): n is a, c, g, or t
tttttttaagcagtggtatcaacgcagagtacnnaagacggannccgctaatnntttttttttttttttttttttttttttttt

SEQ ID NO: 5771 - DNA, 84 bp, Artificial
  Barcode component
  misc_feature (33)..(34): n is a, c, g, or t
  misc_feature (43)..(44): n is a, c, g, or t
  misc_feature (53)..(54): n is a, c, g, or t
tttttttaagcagtggtatcaacgcagagtacnnaagacgganngattcgcanntttttttttttttttttttttttttttttt

SEQ ID NO: 5772 - DNA, 84 bp, Artificial
  Barcode component
  misc_feature (33)..(34): n is a, c, g, or t
  misc_feature (43)..(44): n is a, c, g, or t
  misc_feature (53)..(54): n is a, c, g, or t
tttttttaagcagtggtatcaacgcagagtacnnaagacgganncgatggaanntttttttttttttttttttttttttttttt

SEQ ID NO: 5773 - DNA, 84 bp, Artificial
  Barcode component
  misc_feature (33)..(34): n is a, c, g, or t
  misc_feature (43)..(44): n is a, c, g, or t
  misc_feature (53)..(54): n is a, c, g, or t
tttttttaagcagtggtatcaacgcagagtacnnaagacggannagcaagganntttttttttttttttttttttttttttttt

SEQ ID NO: 5774 - DNA, 84 bp, Artificial
  Barcode component
  misc_feature (33)..(34): n is a, c, g, or t
  misc_feature (43)..(44): n is a, c, g, or t
  misc_feature (53)..(54): n is a, c, g, or t
tttttttaagcagtggtatcaacgcagagtacnnaagacgganncgtagcaanntttttttttttttttttttttttttttttt

SEQ ID NO: 5775 - DNA, 84 bp, Artificial
  Barcode component
  misc_feature (33)..(34): n is a, c, g, or t
  misc_feature (43)..(44): n is a, c, g, or t
  misc_feature (53)..(54): n is a, c, g, or t
tttttttaagcagtggtatcaacgcagagtacnnaagacgganntggcagtanntttttttttttttttttttttttttttttt

SEQ ID NO: 5776 - DNA, 84 bp, Artificial
  Barcode component
  misc_feature (33)..(34): n is a, c, g, or t
  misc_feature (43)..(44): n is a, c, g, or t
  misc_feature (53)..(54): n is a, c, g, or t
tttttttaagcagtggtatcaacgcagagtacnnaagacgganncggtagttnntttttttttttttttttttttttttttttt

SEQ ID NO: 5777 - DNA, 84 bp, Artificial
  Barcode component
  misc_feature (33)..(34): n is a, c, g, or t
  misc_feature (43)..(44): n is a, c, g, or t
  misc_feature (53)..(54): n is a, c, g, or t
tttttttaagcagtggtatcaacgcagagtacnnaagacgganntgacttcgnntttttttttttttttttttttttttttttt

SEQ ID NO: 5778 - DNA, 84 bp, Artificial
  Barcode component
  misc_feature (33)..(34): n is a, c, g, or t
  misc_feature (43)..(44): n is a, c, g, or t
  misc_feature (53)..(54): n is a, c, g, or t
tttttttaagcagtggtatcaacgcagagtacnnaagacgganngagtgcaanntttttttttttttttttttttttttttttt

SEQ ID NO: 5779 - DNA, 84 bp, Artificial
  Barcode component
  misc_feature (33)..(34): n is a, c, g, or t
  misc_feature (43)..(44): n is a, c, g, or t
  misc_feature (53)..(54): n is a, c, g, or t
tttttttaagcagtggtatcaacgcagagtacnnaagacggannacggtaacnntttttttttttttttttttttttttttttt

SEQ ID NO: 5780 - DNA, 84 bp, Artificial
  Barcode component
  misc_feature (33)..(34): n is a, c, g, or t
  misc_feature (43)..(44): n is a, c, g, or t
  misc_feature (53)..(54): n is a, c, g, or t
tttttttaagcagtggtatcaacgcagagtacnnaagacggannaagtggtgnntttttttttttttttttttttttttttttt

SEQ ID NO: 5781 - DNA, 84 bp, Artificial
  Barcode component
  misc_feature (33)..(34): n is a, c, g, or t
  misc_feature (43)..(44): n is a, c, g, or t
  misc_feature (53)..(54): n is a, c, g, or t
tttttttaagcagtggtatcaacgcagagtacnnaagacggannggagacaanntttttttttttttttttttttttttttttt

SEQ ID NO: 5782 - DNA, 84 bp, Artificial
  Barcode component
  misc_feature (33)..(34): n is a, c, g, or t
  misc_feature (43)..(44): n is a, c, g, or t
  misc_feature (53)..(54): n is a, c, g, or t
tttttttaagcagtggtatcaacgcagagtacnnaagacgganntcaaggacnntttttttttttttttttttttttttttttt

SEQ ID NO: 5783 - DNA, 84 bp, Artificial
  Barcode component
  misc_feature (33)..(34): n is a, c, g, or t
  misc_feature (43)..(44): n is a, c, g, or t
  misc_feature (53)..(54): n is a, c, g, or t
tttttttaagcagtggtatcaacgcagagtacnnaagacggannaagagagcnntttttttttttttttttttttttttttttt

SEQ ID NO: 5784 - DNA, 84 bp, Artificial
  Barcode component
  misc_feature (33)..(34): n is a, c, g, or t
  misc_feature (43)..(44): n is a, c, g, or t
  misc_feature (53)..(54): n is a, c, g, or t
tttttttaagcagtggtatcaacgcagagtacnnaagacgganncgagagatnntttttttttttttttttttttttttttttt

SEQ ID NO: 5785 - DNA, 84 bp, Artificial
  Barcode component
  misc_feature (33)..(34): n is a, c, g, or t
  misc_feature (43)..(44): n is a, c, g, or t
  misc_feature (53)..(54): n is a, c, g, or t
tttttttaagcagtggtatcaacgcagagtacnnaagacggannacagatggnntttttttttttttttttttttttttttttt

SEQ ID NO: 5786 - DNA, 84 bp, Artificial
  Barcode component
  misc_feature (33)..(34): n is a, c, g, or t
  misc_feature (43)..(44): n is a, c, g, or t
  misc_feature (53)..(54): n is a, c, g, or t
tttttttaagcagtggtatcaacgcagagtacnnaagacggannaggagtcanntttttttttttttttttttttttttttttt

SEQ ID NO: 5787 - DNA, 84 bp, Artificial
  Barcode component
  misc_feature (33)..(34): n is a, c, g, or t
  misc_feature (43)..(44): n is a, c, g, or t
  misc_feature (53)..(54): n is a, c, g, or t
tttttttaagcagtggtatcaacgcagagtacnnaagacgganncgtgttacnntttttttttttttttttttttttttttttt

SEQ ID NO: 5788 - DNA, 84 bp, Artificial
  Barcode component
  misc_feature (33)..(34): n is a, c, g, or t
  misc_feature (43)..(44): n is a, c, g, or t
  misc_feature (53)..(54): n is a, c, g, or t
tttttttaagcagtggtatcaacgcagagtacnnaagacgganntagtgtgcnntttttttttttttttttttttttttttttt

SEQ ID NO: 5789 - DNA, 84 bp, Artificial
  Barcode component
  misc_feature (33)..(34): n is a, c, g, or t
  misc_feature (43)..(44): n is a, c, g, or t
  misc_feature (53)..(54): n is a, c, g, or t
tttttttaagcagtggtatcaacgcagagtacnnaagacggannctcatgacnntttttttttttttttttttttttttttttt

SEQ ID NO: 5790 - DNA, 84 bp, Artificial
  Barcode component
  misc_feature (33)..(34): n is a, c, g, or t
  misc_feature (43)..(44): n is a, c, g, or t
  misc_feature (53)..(54): n is a, c, g, or t
tttttttaagcagtggtatcaacgcagagtacnnaagacgganngtatccagnntttttttttttttttttttttttttttttt

SEQ ID NO: 5791 - DNA, 84 bp, Artificial
  Barcode component
  misc_feature (33)..(34): n is a, c, g, or t
  misc_feature (43)..(44): n is a, c, g, or t
  misc_feature (53)..(54): n is a, c, g, or t
tttttttaagcagtggtatcaacgcagagtacnnaagacggannacgcctatnntttttttttttttttttttttttttttttt

SEQ ID NO: 5792 - DNA, 84 bp, Artificial
  Barcode component
  misc_feature (33)..(34): n is a, c, g, or t
  misc_feature (43)..(44): n is a, c, g, or t
  misc_feature (53)..(54): n is a, c, g, or t
tttttttaagcagtggtatcaacgcagagtacnnaagacggannaacgacctnntttttttttttttttttttttttttttttt

SEQ ID NO: 5793 - DNA, 84 bp, Artificial
  Barcode component
  misc_feature (33)..(34): n is a, c, g, or t
  misc_feature (43)..(44): n is a, c, g, or t
  misc_feature (53)..(54): n is a, c, g, or t
tttttttaagcagtggtatcaacgcagagtacnnaagacggannatcaggctnntttttttttttttttttttttttttttttt

SEQ ID NO: 5794 - DNA, 84 bp, Artificial
  Barcode component
  misc_feature (33)..(34): n is a, c, g, or t
  misc_feature (43)..(44): n is a, c, g, or t
  misc_feature (53)..(54): n is a, c, g, or t
tttttttaagcagtggtatcaacgcagagtacnnaagacgganncaagttcgnntttttttttttttttttttttttttttttt

SEQ ID NO: 5795 - DNA, 84 bp, Artificial
  Barcode component
  misc_feature (33)..(34): n is a, c, g, or t
  misc_feature (43)..(44): n is a, c, g, or t
  misc_feature (53)..(54): n is a, c, g, or t
tttttttaagcagtggtatcaacgcagagtacnnaagacgganntagccaganntttttttttttttttttttttttttttttt

SEQ ID NO: 5796 - DNA, 84 bp, Artificial
  Barcode component
  misc_feature (33)..(34): n is a, c, g, or t
  misc_feature (43)..(44): n is a, c, g, or t
  misc_feature (53)..(54): n is a, c, g, or t
tttttttaagcagtggtatcaacgcagagtacnnaagacgganncaatcacgnntttttttttttttttttttttttttttttt

SEQ ID NO: 5797 - DNA, 84 bp, Artificial
  Barcode component
  misc_feature (33)..(34): n is a, c, g, or t
  misc_feature (43)..(44): n is a, c, g, or t
  misc_feature (53)..(54): n is a, c, g, or t
tttttttaagcagtggtatcaacgcagagtacnnaagacgganngcaacaagnntttttttttttttttttttttttttttttt

SEQ ID NO: 5798 - DNA, 84 bp, Artificial
  Barcode component
  misc_feature (33)..(34): n is a, c, g, or t
  misc_feature (43)..(44): n is a, c, g, or t
  misc_feature (53)..(54): n is a, c, g, or t
tttttttaagcagtggtatcaacgcagagtacnnaagacgganncacgacaanntttttttttttttttttttttttttttttt

SEQ ID NO: 5799 - DNA, 84 bp, Artificial
  Barcode component
  misc_feature (33)..(34): n is a, c, g, or t
  misc_feature (43)..(44): n is a, c, g, or t
  misc_feature (53)..(54): n is a, c, g, or t
tttttttaagcagtggtatcaacgcagagtacnnaagacgganntacggaganntttttttttttttttttttttttttttttt

SEQ ID NO: 5800 - DNA, 84 bp, Artificial
  Barcode component
  misc_feature (33)..(34): n is a, c, g, or t
  misc_feature (43)..(44): n is a, c, g, or t
  misc_feature (53)..(54): n is a, c, g, or t
tttttttaagcagtggtatcaacgcagagtacnnaagacgganncgacaaganntttttttttttttttttttttttttttttt

SEQ ID NO: 5801 - DNA, 84 bp, Artificial
  Barcode component
  misc_feature (33)..(34): n is a, c, g, or t
  misc_feature (43)..(44): n is a, c, g, or t
  misc_feature (53)..(54): n is a, c, g, or t
tttttttaagcagtggtatcaacgcagagtacnnaagacgganncgaagtganntttttttttttttttttttttttttttttt

SEQ ID NO: 5802 - DNA, 84 bp, Artificial
  Barcode component
  misc_feature (33)..(34): n is a, c, g, or t
  misc_feature (43)..(44): n is a, c, g, or t
  misc_feature (53)..(54): n is a, c, g, or t
tttttttaagcagtggtatcaacgcagagtacnnaagacggannagctggtanntttttttttttttttttttttttttttttt

SEQ ID NO: 5803 - DNA, 84 bp, Artificial
  Barcode component
  misc_feature (33)..(34): n is a, c, g, or t
  misc_feature (43)..(44): n is a, c, g, or t
  misc_feature (53)..(54): n is a, c, g, or t
tttttttaagcagtggtatcaacgcagagtacnnaagacggannaactaggcnntttttttttttttttttttttttttttttt

SEQ ID NO: 5804 - DNA, 84 bp, Artificial
  Barcode component
  misc_feature (33)..(34): n is a, c, g, or t
  misc_feature (43)..(44): n is a, c, g, or t
  misc_feature (53)..(54): n is a, c, g, or t
tttttttaagcagtggtatcaacgcagagtacnnaagacgganncagcaagtnntttttttttttttttttttttttttttttt

SEQ ID NO: 5805 - DNA, 84 bp, Artificial
  Barcode component
  misc_feature (33)..(34): n is a, c, g, or t
  misc_feature (43)..(44): n is a, c, g, or t
  misc_feature (53)..(54): n is a, c, g, or t
tttttttaagcagtggtatcaacgcagagtacnnaagacggannacgaggtanntttttttttttttttttttttttttttttt

SEQ ID NO: 5806 - DNA, 84 bp, Artificial
  Barcode component
  misc_feature (33)..(34): n is a, c, g, or t
  misc_feature (43)..(44): n is a, c, g, or t
  misc_feature (53)..(54): n is a, c, g, or t
tttttttaagcagtggtatcaacgcagagtacnnaagacgganncatcttccnntttttttttttttttttttttttttttttt

SEQ ID NO: 5807 - DNA, 84 bp, Artificial
  Barcode component
  misc_feature (33)..(34): n is a, c, g, or t
  misc_feature (43)..(44): n is a, c, g, or t
  misc_feature (53)..(54): n is a, c, g, or t
tttttttaagcagtggtatcaacgcagagtacnnaagacgganncctgaatcnntttttttttttttttttttttttttttttt

SEQ ID NO: 5808 - DNA, 84 bp, Artificial
  Barcode component
  misc_feature (33)..(34): n is a, c, g, or t
  misc_feature (43)..(44): n is a, c, g, or t
  misc_feature (53)..(54): n is a, c, g, or t
tttttttaagcagtggtatcaacgcagagtacnnaagacgganntgcagactnntttttttttttttttttttttttttttttt

SEQ ID NO: 5809 - DNA, 84 bp, Artificial
  Barcode component
  misc_feature (33)..(34): n is a, c, g, or t
  misc_feature (43)..(44): n is a, c, g, or t
  misc_feature (53)..(54): n is a, c, g, or t
tttttttaagcagtggtatcaacgcagagtacnnaagacggannagatgtggnntttttttttttttttttttttttttttttt

SEQ ID NO: 5810 - DNA, 84 bp, Artificial
  Barcode component
  misc_feature (33)..(34): n is a, c, g, or t
  misc_feature (43)..(44): n is a, c, g, or t
  misc_feature (53)..(54): n is a, c, g, or t
tttttttaagcagtggtatcaacgcagagtacnnaagacggannagttcgacnntttttttttttttttttttttttttttttt

SEQ ID NO: 5811 - DNA, 84 bp, Artificial
  Barcode component
  misc_feature (33)..(34): n is a, c, g, or t
  misc_feature (43)..(44): n is a, c, g, or t
  misc_feature (53)..(54): n is a, c, g, or t
tttttttaagcagtggtatcaacgcagagtacnnaagacggannacaacctcnntttttttttttttttttttttttttttttt

SEQ ID NO: 5812 - DNA, 84 bp, Artificial
  Barcode component
  misc_feature (33)..(34): n is a, c, g, or t
  misc_feature (43)..(44): n is a, c, g, or t
  misc_feature (53)..(54): n is a, c, g, or t
tttttttaagcagtggtatcaacgcagagtacnnaagacgganncatggtagnntttttttttttttttttttttttttttttt

SEQ ID NO: 5813 - DNA, 84 bp, Artificial
  Barcode component
  misc_feature (33)..(34): n is a, c, g, or t
  misc_feature (43)..(44): n is a, c, g, or t
  misc_feature (53)..(54): n is a, c, g, or t
tttttttaagcagtggtatcaacgcagagtacnnaagacgganncgtatctcnntttttttttttttttttttttttttttttt

SEQ ID NO: 5814 - DNA, 84 bp, Artificial
  Barcode component
  misc_feature (33)..(34): n is a, c, g, or t
  misc_feature (43)..(44): n is a, c, g, or t
  misc_feature (53)..(54): n is a, c, g, or t
tttttttaagcagtggtatcaacgcagagtacnnaagacgganncctagttcnntttttttttttttttttttttttttttttt

SEQ ID NO: 5815 - DNA, 84 bp, Artificial
  Barcode component
  misc_feature (33)..(34): n is a, c, g, or t
  misc_feature (43)..(44): n is a, c, g, or t
  misc_feature (53)..(54): n is a, c, g, or t
tttttttaagcagtggtatcaacgcagagtacnnaagacgganncaagagtcnntttttttttttttttttttttttttttttt

SEQ ID NO: 5816 - DNA, 84 bp, Artificial
  Barcode component
  misc_feature (33)..(34): n is a, c, g, or t
  misc_feature (43)..(44): n is a, c, g, or t
  misc_feature (53)..(54): n is a, c, g, or t
tttttttaagcagtggtatcaacgcagagtacnnactaaccgnnaatcggcanntttttttttttttttttttttttttttttt

SEQ ID NO: 5817 - DNA, 84 bp, Artificial
  Barcode component
  misc_feature (33)..(34): n is a, c, g, or t
  misc_feature (43)..(44): n is a, c, g, or t
  misc_feature (53)..(54): n is a, c, g, or t
tttttttaagcagtggtatcaacgcagagtacnnactaaccgnntacggcatnntttttttttttttttttttttttttttttt

SEQ ID NO: 5818 - DNA, 84 bp, Artificial
  Barcode component
  misc_feature (33)..(34): n is a, c, g, or t
  misc_feature (43)..(44): n is a, c, g, or t
  misc_feature (53)..(54): n is a, c, g, or t
tttttttaagcagtggtatcaacgcagagtacnnactaaccgnnttggatcgnntttttttttttttttttttttttttttttt

SEQ ID NO: 5819 - DNA, 84 bp, Artificial
  Barcode component
  misc_feature (33)..(34): n is a, c, g, or t
  misc_feature (43)..(44): n is a, c, g, or t
  misc_feature (53)..(54): n is a, c, g, or t
tttttttaagcagtggtatcaacgcagagtacnnactaaccgnntggaacganntttttttttttttttttttttttttttttt

SEQ ID NO: 5820 - DNA, 84 bp, Artificial
  Barcode component
  misc_feature (33)..(34): n is a, c, g, or t
  misc_feature (43)..(44): n is a, c, g, or t
  misc_feature (53)..(54): n is a, c, g, or t
tttttttaagcagtggtatcaacgcagagtacnnactaaccgnnggcaatcanntttttttttttttttttttttttttttttt

SEQ ID NO: 5821 - DNA, 84 bp, Artificial
  Barcode component
  misc_feature (33)..(34): n is a, c, g, or t
  misc_feature (43)..(44): n is a, c, g, or t
  misc_feature (53)..(54): n is a, c, g, or t
tttttttaagcagtggtatcaacgcagagtacnnactaaccgnngaatccganntttttttttttttttttttttttttttttt

SEQ ID NO: 5822 - DNA, 84 bp, Artificial
  Barcode component
  misc_feature (33)..(34): n is a, c, g, or t
  misc_feature (43)..(44): n is a, c, g, or t
  misc_feature (53)..(54): n is a, c, g, or t
tttttttaagcagtggtatcaacgcagagtacnnactaaccgnnttacggtgnntttttttttttttttttttttttttttttt

SEQ ID NO: 5823 - DNA, 84 bp, Artificial
  Barcode component
  misc_feature (33)..(34): n is a, c, g, or t
  misc_feature (43)..(44): n is a, c, g, or t
  misc_feature (53)..(54): n is a, c, g, or t
tttttttaagcagtggtatcaacgcagagtacnnactaaccgnncatatcggnntttttttttttttttttttttttttttttt

SEQ ID NO: 5824 - DNA, 84 bp, Artificial
  Barcode component
  misc_feature (33)..(34): n is a, c, g, or t
  misc_feature (43)..(44): n is a, c, g, or t
  misc_feature (53)..(54): n is a, c, g, or t
tttttttaagcagtggtatcaacgcagagtacnnactaaccgnncttcggtanntttttttttttttttttttttttttttttt

SEQ ID NO: 5825 - DNA, 84 bp, Artificial
  Barcode component
  misc_feature (33)..(34): n is a, c, g, or t
  misc_feature (43)..(44): n is a, c, g, or t
  misc_feature (53)..(54): n is a, c, g, or t
tttttttaagcagtggtatcaacgcagagtacnnactaaccgnntcctaacgnntttttttttttttttttttttttttttttt

SEQ ID NO: 5826 - DNA, 84 bp, Artificial
  Barcode component
  misc_feature (33)..(34): n is a, c, g, or t
  misc_feature (43)..(44): n is a, c, g, or t
  misc_feature (53)..(54): n is a, c, g, or t
tttttttaagcagtggtatcaacgcagagtacnnactaaccgnngtaagccanntttttttttttttttttttttttttttttt

SEQ ID NO: 5827 - DNA, 84 bp, Artificial
  Barcode component
  misc_feature (33)..(34): n is a, c, g, or t
  misc_feature (43)..(44): n is a, c, g, or t
  misc_feature (53)..(54): n is a, c, g, or t
tttttttaagcagtggtatcaacgcagagtacnnactaaccgnntaaggtggnntttttttttttttttttttttttttttttt

SEQ ID NO: 5828 - DNA, 84 bp, Artificial
  Barcode component
  misc_feature (33)..(34): n is a, c, g, or t
  misc_feature (43)..(44): n is a, c, g, or t
  misc_feature (53)..(54): n is a, c, g, or t
tttttttaagcagtggtatcaacgcagagtacnnactaaccgnnggtaagctnntttttttttttttttttttttttttttttt

SEQ ID NO: 5829 - DNA, 84 bp, Artificial
  Barcode component
  misc_feature (33)..(34): n is a, c, g, or t
  misc_feature (43)..(44): n is a, c, g, or t
  misc_feature (53)..(54): n is a, c, g, or t
tttttttaagcagtggtatcaacgcagagtacnnactaaccgnntgtgtcganntttttttttttttttttttttttttttttt

SEQ ID NO: 5830 - DNA, 84 bp, Artificial
  Barcode component
  misc_feature (33)..(34): n is a, c, g, or t
  misc_feature (43)..(44): n is a, c, g, or t
  misc_feature (53)..(54): n is a, c, g, or t
tttttttaagcagtggtatcaacgcagagtacnnactaaccgnngagcatganntttttttttttttttttttttttttttttt

SEQ ID NO: 5831 - DNA, 84 bp, Artificial
  Barcode component
  misc_feature (33)..(34): n is a, c, g, or t
  misc_feature (43)..(44): n is a, c, g, or t
  misc_feature (53)..(54): n is a, c, g, or t
tttttttaagcagtggtatcaacgcagagtacnnactaaccgnntcgaagtcnntttttttttttttttttttttttttttttt

SEQ ID NO: 5832 - DNA, 84 bp, Artificial
  Barcode component
  misc_feature (33)..(34): n is a, c, g, or t
  misc_feature (43)..(44): n is a, c, g, or t
  misc_feature (53)..(54): n is a, c, g, or t
tttttttaagcagtggtatcaacgcagagtacnnactaaccgnnggtgaacanntttttttttttttttttttttttttttttt

SEQ ID NO: 5833 - DNA, 84 bp, Artificial
  Barcode component
  misc_feature (33)..(34): n is a, c, g, or t
  misc_feature (43)..(44): n is a, c, g, or t
  misc_feature (53)..(54): n is a, c, g, or t
tttttttaagcagtggtatcaacgcagagtacnnactaaccgnnacatgcacnntttttttttttttttttttttttttttttt

SEQ ID NO: 5834 - DNA, 84 bp, Artificial
  Barcode component
  misc_feature (33)..(34): n is a, c, g, or t
  misc_feature (43)..(44): n is a, c, g, or t
  misc_feature (53)..(54): n is a, c, g, or t
tttttttaagcagtggtatcaacgcagagtacnnactaaccgnnccaacagtnntttttttttttttttttttttttttttttt

SEQ ID NO: 5835 - DNA, 84 bp, Artificial
  Barcode component
  misc_feature (33)..(34): n is a, c, g, or t
  misc_feature (43)..(44): n is a, c, g, or t
  misc_feature (53)..(54): n is a, c, g, or t
tttttttaagcagtggtatcaacgcagagtacnnactaaccgnnagaacagcnntttttttttttttttttttttttttttttt

SEQ ID NO: 5836 - DNA, 84 bp, Artificial
  Barcode component
  misc_feature (33)..(34): n is a, c, g, or t
  misc_feature (43)..(44): n is a, c, g, or t
  misc_feature (53)..(54): n is a, c, g, or t
tttttttaagcagtggtatcaacgcagagtacnnactaaccgnngaacacgtnntttttttttttttttttttttttttttttt

SEQ ID NO: 5837 - DNA, 84 bp, Artificial
  Barcode component
  misc_feature (33)..(34): n is a, c, g, or t
  misc_feature (43)..(44): n is a, c, g, or t
  misc_feature (53)..(54): n is a, c, g, or t
tttttttaagcagtggtatcaacgcagagtacnnactaaccgnnggtcttcanntttttttttttttttttttttttttttttt

SEQ ID NO: 5838 - DNA, 84 bp, Artificial
  Barcode component
  misc_feature (33)..(34): n is a, c, g, or t
  misc_feature (43)..(44): n is a, c, g, or t
  misc_feature (53)..(54): n is a, c, g, or t
tttttttaagcagtggtatcaacgcagagtacnnactaaccgnnaggttcagnntttttttttttttttttttttttttttttt

SEQ ID NO: 5839 - DNA, 84 bp, Artificial
  Barcode component
  misc_feature (33)..(34): n is a, c, g, or t
  misc_feature (43)..(44): n is a, c, g, or t
  misc_feature (53)..(54): n is a, c, g, or t
tttttttaagcagtggtatcaacgcagagtacnnactaaccgnnctagagcanntttttttttttttttttttttttttttttt

SEQ ID NO: 5840 - DNA, 84 bp, Artificial
  Barcode component
  misc_feature (33)..(34): n is a, c, g, or t
  misc_feature (43)..(44): n is a, c, g, or t
  misc_feature (53)..(54): n is a, c, g, or t
tttttttaagcagtggtatcaacgcagagtacnnactaaccgnncttctagcnntttttttttttttttttttttttttttttt

SEQ ID NO: 5841 - DNA, 84 bp, Artificial
  Barcode component
  misc_feature (33)..(34): n is a, c, g, or t
  misc_feature (43)..(44): n is a, c, g, or t
  misc_feature (53)..(54): n is a, c, g, or t
tttttttaagcagtggtatcaacgcagagtacnnactaaccgnngagtaacgnntttttttttttttttttttttttttttttt

SEQ ID NO: 5842 - DNA, 84 bp, Artificial
  Barcode component
  misc_feature (33)..(34): n is a, c, g, or t
  misc_feature (43)..(44): n is a, c, g, or t
  misc_feature (53)..(54): n is a, c, g, or t
tttttttaagcagtggtatcaacgcagagtacnnactaaccgnnctaagaggnntttttttttttttttttttttttttttttt

SEQ ID NO: 5843 - DNA, 84 bp, Artificial
  Barcode component
  misc_feature (33)..(34): n is a, c, g, or t
  misc_feature (43)..(44): n is a, c, g, or t
  misc_feature (53)..(54): n is a, c, g, or t
tttttttaagcagtggtatcaacgcagagtacnnactaaccgnnacgtgtagnntttttttttttttttttttttttttttttt

SEQ ID NO: 5844 - DNA, 84 bp, Artificial
  Barcode component
  misc_feature (33)..(34): n is a, c, g, or t
  misc_feature (43)..(44): n is a, c, g, or t
  misc_feature (53)..(54): n is a, c, g, or t
tttttttaagcagtggtatcaacgcagagtacnnactaaccgnnactacaggnntttttttttttttttttttttttttttttt

SEQ ID NO: 5845 - DNA, 84 bp, Artificial
  Barcode component
  misc_feature (33)..(34): n is a, c, g, or t
  misc_feature (43)..(44): n is a, c, g, or t
  misc_feature (53)..(54): n is a, c, g, or t
tttttttaagcagtggtatcaacgcagagtacnnactaaccgnntacaggtcnntttttttttttttttttttttttttttttt

SEQ ID NO: 5846 - DNA, 84 bp, Artificial
  Barcode component
  misc_feature (33)..(34): n is a, c, g, or t
  misc_feature (43)..(44): n is a, c, g, or t
  misc_feature (53)..(54): n is a, c, g, or t
tttttttaagcagtggtatcaacgcagagtacnnactaaccgnnctcacatgnntttttttttttttttttttttttttttttt

SEQ ID NO: 5847 - DNA, 84 bp, Artificial
  Barcode component
  misc_feature (33)..(34): n is a, c, g, or t
  misc_feature (43)..(44): n is a, c, g, or t
  misc_feature (53)..(54): n is a, c, g, or t
tttttttaagcagtggtatcaacgcagagtacnnactaaccgnnactaggagnntttttttttttttttttttttttttttttt

SEQ ID NO: 5848 - DNA, 84 bp, Artificial
  Barcode component
  misc_feature (33)..(34): n is a, c, g, or t
  misc_feature (43)..(44): n is a, c, g, or t
  misc_feature (53)..(54): n is a, c, g, or t
tttttttaagcagtggtatcaacgcagagtacnnactaaccgnnccatagganntttttttttttttttttttttttttttttt

SEQ ID NO: 5849 - DNA, 84 bp, Artificial
  Barcode component
  misc_feature (33)..(34): n is a, c, g, or t
  misc_feature (43)..(44): n is a, c, g, or t
  misc_feature (53)..(54): n is a, c, g, or t
tttttttaagcagtggtatcaacgcagagtacnnactaaccgnnggagaatcnntttttttttttttttttttttttttttttt

SEQ ID NO: 5850 - DNA, 84 bp, Artificial
  Barcode component
  misc_feature (33)..(34): n is a, c, g, or t
  misc_feature (43)..(44): n is a, c, g, or t
  misc_feature (53)..(54): n is a, c, g, or t
tttttttaagcagtggtatcaacgcagagtacnnactaaccgnngccaagaanntttttttttttttttttttttttttttttt

SEQ ID NO: 5851 - DNA, 84 bp, Artificial
  Barcode component
  misc_feature (33)..(34): n is a, c, g, or t
  misc_feature (43)..(44): n is a, c, g, or t
  misc_feature (53)..(54): n is a, c, g, or t
tttttttaagcagtggtatcaacgcagagtacnnactaaccgnnaaggcaagnntttttttttttttttttttttttttttttt

SEQ ID NO: 5852 - DNA, 84 bp, Artificial
  Barcode component
  misc_feature (33)..(34): n is a, c, g, or t
  misc_feature (43)..(44): n is a, c, g, or t
  misc_feature (53)..(54): n is a, c, g, or t
tttttttaagcagtggtatcaacgcagagtacnnactaaccgnnaatgtcgcnntttttttttttttttttttttttttttttt

SEQ ID NO: 5853 - DNA, 84 bp, Artificial
  Barcode component
  misc_feature (33)..(34): n is a, c, g, or t
  misc_feature (43)..(44): n is a, c, g, or t
  misc_feature (53)..(54): n is a, c, g, or t
tttttttaagcagtggtatcaacgcagagtacnnactaaccgnnatggaaccnntttttttttttttttttttttttttttttt

SEQ ID NO: 5854 - DNA, 84 bp, Artificial
  Barcode component
  misc_feature (33)..(34): n is a, c, g, or t
  misc_feature (43)..(44): n is a, c, g, or t
  misc_feature (53)..(54): n is a, c, g, or t
tttttttaagcagtggtatcaacgcagagtacnnactaaccgnnagaggcatnntttttttttttttttttttttttttttttt

SEQ ID NO: 5855 - DNA, 84 bp, Artificial
  Barcode component
  misc_feature (33)..(34): n is a, c, g, or t
  misc_feature (43)..(44): n is a, c, g, or t
  misc_feature (53)..(54): n is a, c, g, or t
tttttttaagcagtggtatcaacgcagagtacnnactaaccgnntgcatagcnntttttttttttttttttttttttttttttt

SEQ ID NO: 5856 - DNA, 84 bp, Artificial
  Barcode component
  misc_feature (33)..(34): n is a, c, g, or t
  misc_feature (43)..(44): n is a, c, g, or t
  misc_feature (53)..(54): n is a, c, g, or t
tttttttaagcagtggtatcaacgcagagtacnnactaaccgnnctaacgganntttttttttttttttttttttttttttttt

SEQ ID NO: 5857 - DNA, 84 bp, Artificial
  Barcode component
  misc_feature (33)..(34): n is a, c, g, or t
  misc_feature (43)..(44): n is a, c, g, or t
  misc_feature (53)..(54): n is a, c, g, or t
tttttttaagcagtggtatcaacgcagagtacnnactaaccgnntatcgaggnntttttttttttttttttttttttttttttt

SEQ ID NO: 5858 - DNA, 84 bp, Artificial
  Barcode component
  misc_feature (33)..(34): n is a, c, g, or t
  misc_feature (43)..(44): n is a, c, g, or t
  misc_feature (53)..(54): n is a, c, g, or t
tttttttaagcagtggtatcaacgcagagtacnnactaaccgnncatagcctnntttttttttttttttttttttttttttttt

SEQ ID NO: 5859 - DNA, 84 bp, Artificial
  Barcode component
  misc_feature (33)..(34): n is a, c, g, or t
  misc_feature (43)..(44): n is a, c, g, or t
  misc_feature (53)..(54): n is a, c, g, or t
tttttttaagcagtggtatcaacgcagagtacnnactaaccgnnatcgagacnntttttttttttttttttttttttttttttt

SEQ ID NO: 5860 - DNA, 84 bp, Artificial
  Barcode component
  misc_feature (33)..(34): n is a, c, g, or t
  misc_feature (43)..(44): n is a, c, g, or t
  misc_feature (53)..(54): n is a, c, g, or t
tttttttaagcagtggtatcaacgcagagtacnnactaaccgnnggaagagtnntttttttttttttttttttttttttttttt

SEQ ID NO: 5861 - DNA, 84 bp, Artificial
  Barcode component
  misc_feature (33)..(34): n is a, c, g, or t
  misc_feature (43)..(44): n is a, c, g, or t
  misc_feature (53)..(54): n is a, c, g, or t
tttttttaagcagtggtatcaacgcagagtacnnactaaccgnnccaagtagnntttttttttttttttttttttttttttttt

SEQ ID NO: 5862 - DNA, 84 bp, Artificial
  Barcode component
  misc_feature (33)..(34): n is a, c, g, or t
  misc_feature (43)..(44): n is a, c, g, or t
  misc_feature (53)..(54): n is a, c, g, or t
tttttttaagcagtggtatcaacgcagagtacnnactaaccgnnctgaacagnntttttttttttttttttttttttttttttt

SEQ ID NO: 5863 - DNA, 84 bp, Artificial
  Barcode component
  misc_feature (33)..(34): n is a, c, g, or t
  misc_feature (43)..(44): n is a, c, g, or t
  misc_feature (53)..(54): n is a, c, g, or t
tttttttaagcagtggtatcaacgcagagtacnnactaaccgnngtaggttcnntttttttttttttttttttttttttttttt

SEQ ID NO: 5864 - DNA, 84 bp, Artificial
  Barcode component
  misc_feature (33)..(34): n is a, c, g, or t
  misc_feature (43)..(44): n is a, c, g, or t
  misc_feature (53)..(54): n is a, c, g, or t
tttttttaagcagtggtatcaacgcagagtacnnactaaccgnngtatggacnntttttttttttttttttttttttttttttt

SEQ ID NO: 5865 - DNA, 84 bp, Artificial
  Barcode component
  misc_feature (33)..(34): n is a, c, g, or t
  misc_feature (43)..(44): n is a, c, g, or t
  misc_feature (53)..(54): n is a, c, g, or t
tttttttaagcagtggtatcaacgcagagtacnnactaaccgnntcgcaacanntttttttttttttttttttttttttttttt

SEQ ID NO: 5866 - DNA, 84 bp, Artificial
  Barcode component
  misc_feature (33)..(34): n is a, c, g, or t
  misc_feature (43)..(44): n is a, c, g, or t
  misc_feature (53)..(54): n is a, c, g, or t
tttttttaagcagtggtatcaacgcagagtacnnactaaccgnnccgctaatnntttttttttttttttttttttttttttttt

SEQ ID NO: 5867 - DNA, 84 bp, Artificial
  Barcode component
  misc_feature (33)..(34): n is a, c, g, or t
  misc_feature (43)..(44): n is a, c, g, or t
  misc_feature (53)..(54): n is a, c, g, or t
tttttttaagcagtggtatcaacgcagagtacnnactaaccgnngattcgcanntttttttttttttttttttttttttttttt

SEQ ID NO: 5868 - DNA, 84 bp, Artificial
  Barcode component
  misc_feature (33)..(34): n is a, c, g, or t
  misc_feature (43)..(44): n is a, c, g, or t
  misc_feature (53)..(54): n is a, c, g, or t
tttttttaagcagtggtatcaacgcagagtacnnactaaccgnncgatggaanntttttttttttttttttttttttttttttt

SEQ ID NO: 5869 - DNA, 84 bp, Artificial
  Barcode component
  misc_feature (33)..(34): n is a, c, g, or t
  misc_feature (43)..(44): n is a, c, g, or t
  misc_feature (53)..(54): n is a, c, g, or t
tttttttaagcagtggtatcaacgcagagtacnnactaaccgnnagcaagganntttttttttttttttttttttttttttttt

SEQ ID NO: 5870 - DNA, 84 bp, Artificial
  Barcode component
  misc_feature (33)..(34): n is a, c, g, or t
  misc_feature (43)..(44): n is a, c, g, or t
  misc_feature (53)..(54): n is a, c, g, or t
tttttttaagcagtggtatcaacgcagagtacnnactaaccgnncgtagcaanntttttttttttttttttttttttttttttt

SEQ ID NO: 5871 - DNA, 84 bp, Artificial
  Barcode component
  misc_feature (33)..(34): n is a, c, g, or t
  misc_feature (43)..(44): n is a, c, g, or t
  misc_feature (53)..(54): n is a, c, g, or t
tttttttaagcagtggtatcaacgcagagtacnnactaaccgnntggcagtanntttttttttttttttttttttttttttttt

SEQ ID NO: 5872 - DNA, 84 bp, Artificial
  Barcode component
  misc_feature (33)..(34): n is a, c, g, or t
  misc_feature (43)..(44): n is a, c, g, or t
  misc_feature (53)..(54): n is a, c, g, or t
tttttttaagcagtggtatcaacgcagagtacnnactaaccgnncggtagttnntttttttttttttttttttttttttttttt

SEQ ID NO: 5873 - DNA, 84 bp, Artificial
  Barcode component
  misc_feature (33)..(34): n is a, c, g, or t
  misc_feature (43)..(44): n is a, c, g, or t
  misc_feature (53)..(54): n is a, c, g, or t
tttttttaagcagtggtatcaacgcagagtacnnactaaccgnntgacttcgnntttttttttttttttttttttttttttttt

SEQ ID NO: 5874 - DNA, 84 bp, Artificial
  Barcode component
  misc_feature (33)..(34): n is a, c, g, or t
  misc_feature (43)..(44): n is a, c, g, or t
  misc_feature (53)..(54): n is a, c, g, or t
tttttttaagcagtggtatcaacgcagagtacnnactaaccgnngagtgcaanntttttttttttttttttttttttttttttt

SEQ ID NO: 5875 - DNA, 84 bp, Artificial
  Barcode component
  misc_feature (33)..(34): n is a, c, g, or t
  misc_feature (43)..(44): n is a, c, g, or t
  misc_feature (53)..(54): n is a, c, g, or t
tttttttaagcagtggtatcaacgcagagtacnnactaaccgnnacggtaacnntttttttttttttttttttttttttttttt

SEQ ID NO: 5876 - DNA, 84 bp, Artificial
  Barcode component
  misc_feature (33)..(34): n is a, c, g, or t
  misc_feature (43)..(44): n is a, c, g, or t
  misc_feature (53)..(54): n is a, c, g, or t
tttttttaagcagtggtatcaacgcagagtacnnactaaccgnnaagtggtgnntttttttttttttttttttttttttttttt

SEQ ID NO: 5877 - DNA, 84 bp, Artificial
  Barcode component
  misc_feature (33)..(34): n is a, c, g, or t
  misc_feature (43)..(44): n is a, c, g, or t
  misc_feature (53)..(54): n is a, c, g, or t
tttttttaagcagtggtatcaacgcagagtacnnactaaccgnnggagacaanntttttttttttttttttttttttttttttt

SEQ ID NO: 5878 - DNA, 84 bp, Artificial
  Barcode component
  misc_feature (33)..(34): n is a, c, g, or t
  misc_feature (43)..(44): n is a, c, g, or t
  misc_feature (53)..(54): n is a, c, g, or t
tttttttaagcagtggtatcaacgcagagtacnnactaaccgnntcaaggacnntttttttttttttttttttttttttttttt

SEQ ID NO: 5879 - DNA, 84 bp, Artificial
  Barcode component
  misc_feature (33)..(34): n is a, c, g, or t
  misc_feature (43)..(44): n is a, c, g, or t
  misc_feature (53)..(54): n is a, c, g, or t
tttttttaagcagtggtatcaacgcagagtacnnactaaccgnnaagagagcnntttttttttttttttttttttttttttttt

SEQ ID NO: 5880 - DNA, 84 bp, Artificial
  Barcode component
  misc_feature (33)..(34): n is a, c, g, or t
  misc_feature (43)..(44): n is a, c, g, or t
  misc_feature (53)..(54): n is a, c, g, or t
tttttttaagcagtggtatcaacgcagagtacnnactaaccgnncgagagatnntttttttttttttttttttttttttttttt

SEQ ID NO: 5881 - DNA, 84 bp, Artificial
  Barcode component
  misc_feature (33)..(34): n is a, c, g, or t
  misc_feature (43)..(44): n is a, c, g, or t
  misc_feature (53)..(54): n is a, c, g, or t
tttttttaagcagtggtatcaacgcagagtacnnactaaccgnnacagatggnntttttttttttttttttttttttttttttt

SEQ ID NO: 5882 - DNA, 84 bp, Artificial
  Barcode component
  misc_feature (33)..(34): n is a, c, g, or t
  misc_feature (43)..(44): n is a, c, g, or t
  misc_feature (53)..(54): n is a, c, g, or t
tttttttaagcagtggtatcaacgcagagtacnnactaaccgnnaggagtcanntttttttttttttttttttttttttttttt

SEQ ID NO: 5883 - DNA, 84 bp, Artificial
  Barcode component
  misc_feature (33)..(34): n is a, c, g, or t
  misc_feature (43)..(44): n is a, c, g, or t
  misc_feature (53)..(54): n is a, c, g, or t
tttttttaagcagtggtatcaacgcagagtacnnactaaccgnncgtgttacnntttttttttttttttttttttttttttttt

SEQ ID NO: 5884 - DNA, 84 bp, Artificial
  Barcode component
  misc_feature (33)..(34): n is a, c, g, or t
  misc_feature (43)..(44): n is a, c, g, or t
  misc_feature (53)..(54): n is a, c, g, or t
tttttttaagcagtggtatcaacgcagagtacnnactaaccgnntagtgtgcnntttttttttttttttttttttttttttttt

SEQ ID NO: 5885 - DNA, 84 bp, Artificial
  Barcode component
  misc_feature (33)..(34): n is a, c, g, or t
  misc_feature (43)..(44): n is a, c, g, or t
  misc_feature (53)..(54): n is a, c, g, or t
tttttttaagcagtggtatcaacgcagagtacnnactaaccgnnctcatgacnntttttttttttttttttttttttttttttt

SEQ ID NO: 5886 - DNA, 84 bp, Artificial
  Barcode component
  misc_feature (33)..(34): n is a, c, g, or t
  misc_feature (43)..(44): n is a, c, g, or t
  misc_feature (53)..(54): n is a, c, g, or t
tttttttaagcagtggtatcaacgcagagtacnnactaaccgnngtatccagnntttttttttttttttttttttttttttttt

SEQ ID NO: 5887 - DNA, 84 bp, Artificial
  Barcode component
  misc_feature (33)..(34): n is a, c, g, or t
  misc_feature (43)..(44): n is a, c, g, or t
  misc_feature (53)..(54): n is a, c, g, or t
tttttttaagcagtggtatcaacgcagagtacnnactaaccgnnacgcctatnntttttttttttttttttttttttttttttt

SEQ ID NO: 5888 - DNA, 84 bp, Artificial
  Barcode component
  misc_feature (33)..(34): n is a, c, g, or t
  misc_feature (43)..(44): n is a, c, g, or t
  misc_feature (53)..(54): n is a, c, g, or t
tttttttaagcagtggtatcaacgcagagtacnnactaaccgnnaacgacctnntttttttttttttttttttttttttttttt

SEQ ID NO: 5889 - DNA, 84 bp, Artificial
  Barcode component
  misc_feature (33)..(34): n is a, c, g, or t
  misc_feature (43)..(44): n is a, c, g, or t
  misc_feature (53)..(54): n is a, c, g, or t
tttttttaagcagtggtatcaacgcagagtacnnactaaccgnnatcaggctnntttttttttttttttttttttttttttttt

SEQ ID NO: 5890 - DNA, 84 bp, Artificial
  Barcode component
  misc_feature (33)..(34): n is a, c, g, or t
  misc_feature (43)..(44): n is a, c, g, or t
  misc_feature (53)..(54): n is a, c, g, or t
tttttttaagcagtggtatcaacgcagagtacnnactaaccgnncaagttcgnntttttttttttttttttttttttttttttt

SEQ ID NO: 5891 - DNA, 84 bp, Artificial
  Barcode component
  misc_feature (33)..(34): n is a, c, g, or t
  misc_feature (43)..(44): n is a, c, g, or t
  misc_feature (53)..(54): n is a, c, g, or t
tttttttaagcagtggtatcaacgcagagtacnnactaaccgnntagccaganntttttttttttttttttttttttttttttt

SEQ ID NO: 5892 - DNA, 84 bp, Artificial
  Barcode component
  misc_feature (33)..(34): n is a, c, g, or t
  misc_feature (43)..(44): n is a, c, g, or t
  misc_feature (53)..(54): n is a, c, g, or t
tttttttaagcagtggtatcaacgcagagtacnnactaaccgnncaatcacgnntttttttttttttttttttttttttttttt

SEQ ID NO: 5893 - DNA, 84 bp, Artificial
  Barcode component
  misc_feature (33)..(34): n is a, c, g, or t
  misc_feature (43)..(44): n is a, c, g, or t
  misc_feature (53)..(54): n is a, c, g, or t
tttttttaagcagtggtatcaacgcagagtacnnactaaccgnngcaacaagnntttttttttttttttttttttttttttttt

SEQ ID NO: 5894 - DNA, 84 bp, Artificial
  Barcode component
  misc_feature (33)..(34): n is a, c, g, or t
  misc_feature (43)..(44): n is a, c, g, or t
  misc_feature (53)..(54): n is a, c, g, or t
tttttttaagcagtggtatcaacgcagagtacnnactaaccgnncacgacaanntttttttttttttttttttttttttttttt

SEQ ID NO: 5895 - DNA, 84 bp, Artificial
  Barcode component
  misc_feature (33)..(34): n is a, c, g, or t
  misc_feature (43)..(44): n is a, c, g, or t
  misc_feature (53)..(54): n is a, c, g, or t
tttttttaagcagtggtatcaacgcagagtacnnactaaccgnntacggaganntttttttttttttttttttttttttttttt

SEQ ID NO: 5896 - DNA, 84 bp, Artificial
  Barcode component
  misc_feature (33)..(34): n is a, c, g, or t
  misc_feature (43)..(44): n is a, c, g, or t
  misc_feature (53)..(54): n is a, c, g, or t
tttttttaagcagtggtatcaacgcagagtacnnactaaccgnncgacaaganntttttttttttttttttttttttttttttt

SEQ ID NO: 5897 - DNA, 84 bp, Artificial
  Barcode component
  misc_feature (33)..(34): n is a, c, g, or t
  misc_feature (43)..(44): n is a, c, g, or t
  misc_feature (53)..(54): n is a, c, g, or t
tttttttaagcagtggtatcaacgcagagtacnnactaaccgnncgaagtganntttttttttttttttttttttttttttttt

SEQ ID NO: 5898 - DNA, 84 bp, Artificial
  Barcode component
  misc_feature (33)..(34): n is a, c, g, or t
  misc_feature (43)..(44): n is a, c, g, or t
  misc_feature (53)..(54): n is a, c, g, or t
tttttttaagcagtggtatcaacgcagagtacnnactaaccgnnagctggtanntttttttttttttttttttttttttttttt

SEQ ID NO: 5899 - DNA, 84 bp, Artificial
  Barcode component
  misc_feature (33)..(34): n is a, c, g, or t
  misc_feature (43)..(44): n is a, c, g, or t
  misc_feature (53)..(54): n is a, c, g, or t
tttttttaagcagtggtatcaacgcagagtacnnactaaccgnnaactaggcnntttttttttttttttttttttttttttttt

SEQ ID NO: 5900 - DNA, 84 bp, Artificial
  Barcode component
  misc_feature (33)..(34): n is a, c, g, or t
  misc_feature (43)..(44): n is a, c, g, or t
  misc_feature (53)..(54): n is a, c, g, or t
tttttttaagcagtggtatcaacgcagagtacnnactaaccgnncagcaagtnntttttttttttttttttttttttttttttt

SEQ ID NO: 5901 - DNA, 84 bp, Artificial
  Barcode component
  misc_feature (33)..(34): n is a, c, g, or t
  misc_feature (43)..(44): n is a, c, g, or t
  misc_feature (53)..(54): n is a, c, g, or t
tttttttaagcagtggtatcaacgcagagtacnnactaaccgnnacgaggtanntttttttttttttttttttttttttttttt

SEQ ID NO: 5902 - DNA, 84 bp, Artificial
  Barcode component
  misc_feature (33)..(34): n is a, c, g, or t
  misc_feature (43)..(44): n is a, c, g, or t
  misc_feature (53)..(54): n is a, c, g, or t
tttttttaagcagtggtatcaacgcagagtacnnactaaccgnncatcttccnntttttttttttttttttttttttttttttt

SEQ ID NO: 5903 - DNA, 84 bp, Artificial
  Barcode component
  misc_feature (33)..(34): n is a, c, g, or t
  misc_feature (43)..(44): n is a, c, g, or t
  misc_feature (53)..(54): n is a, c, g, or t
tttttttaagcagtggtatcaacgcagagtacnnactaaccgnncctgaatcnntttttttttttttttttttttttttttttt

SEQ ID NO: 5904 - DNA, 84 bp, Artificial
  Barcode component
  misc_feature (33)..(34): n is a, c, g, or t
  misc_feature (43)..(44): n is a, c, g, or t
  misc_feature (53)..(54): n is a, c, g, or t
tttttttaagcagtggtatcaacgcagagtacnnactaaccgnntgcagactnntttttttttttttttttttttttttttttt

SEQ ID NO: 5905 - DNA, 84 bp, Artificial
  Barcode component
  misc_feature (33)..(34): n is a, c, g, or t
  misc_feature (43)..(44): n is a, c, g, or t
  misc_feature (53)..(54): n is a, c, g, or t
tttttttaagcagtggtatcaacgcagagtacnnactaaccgnnagatgtggnntttttttttttttttttttttttttttttt

SEQ ID NO: 5906 - DNA, 84 bp, Artificial
  Barcode component
  misc_feature (33)..(34): n is a, c, g, or t
  misc_feature (43)..(44): n is a, c, g, or t
  misc_feature (53)..(54): n is a, c, g, or t
tttttttaagcagtggtatcaacgcagagtacnnactaaccgnnagttcgacnntttttttttttttttttttttttttttttt

SEQ ID NO: 5907 - DNA, 84 bp, Artificial
  Barcode component
  misc_feature (33)..(34): n is a, c, g, or t
  misc_feature (43)..(44): n is a, c, g, or t
  misc_feature (53)..(54): n is a, c, g, or t
tttttttaagcagtggtatcaacgcagagtacnnactaaccgnnacaacctcnntttttttttttttttttttttttttttttt

SEQ ID NO: 5908 - DNA, 84 bp, Artificial
  Barcode component
  misc_feature (33)..(34): n is a, c, g, or t
  misc_feature (43)..(44): n is a, c, g, or t
  misc_feature (53)..(54): n is a, c, g, or t
tttttttaagcagtggtatcaacgcagagtacnnactaaccgnncatggtagnntttttttttttttttttttttttttttttt

SEQ ID NO: 5909 - DNA, 84 bp, Artificial
  Barcode component
  misc_feature (33)..(34): n is a, c, g, or t
  misc_feature (43)..(44): n is a, c, g, or t
  misc_feature (53)..(54): n is a, c, g, or t
tttttttaagcagtggtatcaacgcagagtacnnactaaccgnncgtatctcnntttttttttttttttttttttttttttttt

SEQ ID NO: 5910 - DNA, 84 bp, Artificial
  Barcode component
  misc_feature (33)..(34): n is a, c, g, or t
  misc_feature (43)..(44): n is a, c, g, or t
  misc_feature (53)..(54): n is a, c, g, or t
tttttttaagcagtggtatcaacgcagagtacnnactaaccgnncctagttcnntttttttttttttttttttttttttttttt

SEQ ID NO: 5911 - DNA, 84 bp, Artificial
  Barcode component
  misc_feature (33)..(34): n is a, c, g, or t
  misc_feature (43)..(44): n is a, c, g, or t
  misc_feature (53)..(54): n is a, c, g, or t
tttttttaagcagtggtatcaacgcagagtacnnactaaccgnncaagagtcnntttttttttttttttttttttttttttttt

SEQ ID NO: 5912 - DNA, 84 bp, Artificial
  Barcode component
  misc_feature (33)..(34): n is a, c, g, or t
  misc_feature (43)..(44): n is a, c, g, or t
  misc_feature (53)..(54): n is a, c, g, or t
tttttttaagcagtggtatcaacgcagagtacnngtgcacaannaatcggcanntttttttttttttttttttttttttttttt

SEQ ID NO: 5913 - DNA, 84 bp, Artificial
  Barcode component
  misc_feature (33)..(34): n is a, c, g, or t
  misc_feature (43)..(44): n is a, c, g, or t
  misc_feature (53)..(54): n is a, c, g, or t
tttttttaagcagtggtatcaacgcagagtacnngtgcacaanntacggcatnntttttttttttttttttttttttttttttt

SEQ ID NO: 5914 - DNA, 84 bp, Artificial
  Barcode component
  misc_feature (33)..(34): n is a, c, g, or t
  misc_feature (43)..(44): n is a, c, g, or t
  misc_feature (53)..(54): n is a, c, g, or t
tttttttaagcagtggtatcaacgcagagtacnngtgcacaannttggatcgnntttttttttttttttttttttttttttttt

SEQ ID NO: 5915 - DNA, 84 bp, Artificial
  Barcode component
  misc_feature (33)..(34): n is a, c, g, or t
  misc_feature (43)..(44): n is a, c, g, or t
  misc_feature (53)..(54): n is a, c, g, or t
tttttttaagcagtggtatcaacgcagagtacnngtgcacaanntggaacganntttttttttttttttttttttttttttttt

SEQ ID NO: 5916 - DNA, 84 bp, Artificial
  Barcode component
  misc_feature (33)..(34): n is a, c, g, or t
  misc_feature (43)..(44): n is a, c, g, or t
  misc_feature (53)..(54): n is a, c, g, or t
tttttttaagcagtggtatcaacgcagagtacnngtgcacaannggcaatcanntttttttttttttttttttttttttttttt

SEQ ID NO: 5917 - DNA, 84 bp, Artificial
  Barcode component
  misc_feature (33)..(34): n is a, c, g, or t
  misc_feature (43)..(44): n is a, c, g, or t
  misc_feature (53)..(54): n is a, c, g, or t
tttttttaagcagtggtatcaacgcagagtacnngtgcacaanngaatccganntttttttttttttttttttttttttttttt

SEQ ID NO: 5918 - DNA, 84 bp, Artificial
  Barcode component
  misc_feature (33)..(34): n is a, c, g, or t
  misc_feature (43)..(44): n is a, c, g, or t
  misc_feature (53)..(54): n is a, c, g, or t
tttttttaagcagtggtatcaacgcagagtacnngtgcacaannttacggtgnntttttttttttttttttttttttttttttt

SEQ ID NO: 5919 - DNA, 84 bp, Artificial
  Barcode component
  misc_feature (33)..(34): n is a, c, g, or t
  misc_feature (43)..(44): n is a, c, g, or t
  misc_feature (53)..(54): n is a, c, g, or t
tttttttaagcagtggtatcaacgcagagtacnngtgcacaanncatatcggnntttttttttttttttttttttttttttttt

SEQ ID NO: 5920 - DNA, 84 bp, Artificial
  Barcode component
  misc_feature (33)..(34): n is a, c, g, or t
  misc_feature (43)..(44): n is a, c, g, or t
  misc_feature (53)..(54): n is a, c, g, or t
tttttttaagcagtggtatcaacgcagagtacnngtgcacaanncttcggtanntttttttttttttttttttttttttttttt

SEQ ID NO: 5921 - DNA, 84 bp, Artificial
  Barcode component
  misc_feature (33)..(34): n is a, c, g, or t
  misc_feature (43)..(44): n is a, c, g, or t
  misc_feature (53)..(54): n is a, c, g, or t
tttttttaagcagtggtatcaacgcagagtacnngtgcacaanntcctaacgnntttttttttttttttttttttttttttttt

SEQ ID NO: 5922 - DNA, 84 bp, Artificial
  Barcode component
  misc_feature (33)..(34): n is a, c, g, or t
  misc_feature (43)..(44): n is a, c, g, or t
  misc_feature (53)..(54): n is a, c, g, or t
tttttttaagcagtggtatcaacgcagagtacnngtgcacaanngtaagccanntttttttttttttttttttttttttttttt

SEQ ID NO: 5923 - DNA, 84 bp, Artificial
  Barcode component
  misc_feature (33)..(34): n is a, c, g, or t
  misc_feature (43)..(44): n is a, c, g, or t
  misc_feature (53)..(54): n is a, c, g, or t
tttttttaagcagtggtatcaacgcagagtacnngtgcacaanntaaggtggnntttttttttttttttttttttttttttttt

SEQ ID NO: 5924 - DNA, 84 bp, Artificial
  Barcode component
  misc_feature (33)..(34): n is a, c, g, or t
  misc_feature (43)..(44): n is a, c, g, or t
  misc_feature (53)..(54): n is a, c, g, or t
tttttttaagcagtggtatcaacgcagagtacnngtgcacaannggtaagctnntttttttttttttttttttttttttttttt

SEQ ID NO: 5925 - DNA, 84 bp, Artificial
  Barcode component
  misc_feature (33)..(34): n is a, c, g, or t
  misc_feature (43)..(44): n is a, c, g, or t
  misc_feature (53)..(54): n is a, c, g, or t
tttttttaagcagtggtatcaacgcagagtacnngtgcacaanntgtgtcganntttttttttttttttttttttttttttttt

SEQ ID NO: 5926 - DNA, 84 bp, Artificial
  Barcode component
  misc_feature (33)..(34): n is a, c, g, or t
  misc_feature (43)..(44): n is a, c, g, or t
  misc_feature (53)..(54): n is a, c, g, or t
tttttttaagcagtggtatcaacgcagagtacnngtgcacaanngagcatganntttttttttttttttttttttttttttttt

SEQ ID NO: 5927 - DNA, 84 bp, Artificial
  Barcode component
  misc_feature (33)..(34): n is a, c, g, or t
  misc_feature (43)..(44): n is a, c, g, or t
  misc_feature (53)..(54): n is a, c, g, or t
tttttttaagcagtggtatcaacgcagagtacnngtgcacaanntcgaagtcnntttttttttttttttttttttttttttttt

SEQ ID NO: 5928 - DNA, 84 bp, Artificial
  Barcode component
  misc_feature (33)..(34): n is a, c, g, or t
  misc_feature (43)..(44): n is a, c, g, or t
  misc_feature (53)..(54): n is a, c, g, or t
tttttttaagcagtggtatcaacgcagagtacnngtgcacaannggtgaacanntttttttttttttttttttttttttttttt

SEQ ID NO: 5929 - DNA, 84 bp, Artificial
  Barcode component
  misc_feature (33)..(34): n is a, c, g, or t
  misc_feature (43)..(44): n is a, c, g, or t
  misc_feature (53)..(54): n is a, c, g, or t
tttttttaagcagtggtatcaacgcagagtacnngtgcacaannacatgcacnntttttttttttttttttttttttttttttt

SEQ ID NO: 5930 - DNA, 84 bp, Artificial
  Barcode component
  misc_feature (33)..(34): n is a, c, g, or t
  misc_feature (43)..(44): n is a, c, g, or t
  misc_feature (53)..(54): n is a, c, g, or t
tttttttaagcagtggtatcaacgcagagtacnngtgcacaannccaacagtnntttttttttttttttttttttttttttttt

SEQ ID NO: 5931 - DNA, 84 bp, Artificial
  Barcode component
  misc_feature (33)..(34): n is a, c, g, or t
  misc_feature (43)..(44): n is a, c, g, or t
  misc_feature (53)..(54): n is a, c, g, or t
tttttttaagcagtggtatcaacgcagagtacnngtgcacaannagaacagcnntttttttttttttttttttttttttttttt

SEQ ID NO: 5932 - DNA, 84 bp, Artificial
  Barcode component
  misc_feature (33)..(34): n is a, c, g, or t
  misc_feature (43)..(44): n is a, c, g, or t
  misc_feature (53)..(54): n is a, c, g, or t
tttttttaagcagtggtatcaacgcagagtacnngtgcacaanngaacacgtnntttttttttttttttttttttttttttttt

SEQ ID NO: 5933 - DNA, 84 bp, Artificial
  Barcode component
  misc_feature (33)..(34): n is a, c, g, or t
  misc_feature (43)..(44): n is a, c, g, or t
  misc_feature (53)..(54): n is a, c, g, or t
tttttttaagcagtggtatcaacgcagagtacnngtgcacaannggtcttcanntttttttttttttttttttttttttttttt

SEQ ID NO: 5934 - DNA, 84 bp, Artificial
  Barcode component
  misc_feature (33)..(34): n is a, c, g, or t
  misc_feature (43)..(44): n is a, c, g, or t
  misc_feature (53)..(54): n is a, c, g, or t
tttttttaagcagtggtatcaacgcagagtacnngtgcacaannaggttcagnntttttttttttttttttttttttttttttt

SEQ ID NO: 5935 - DNA, 84 bp, Artificial
  Barcode component
  misc_feature (33)..(34): n is a, c, g, or t
  misc_feature (43)..(44): n is a, c, g, or t
  misc_feature (53)..(54): n is a, c, g, or t
tttttttaagcagtggtatcaacgcagagtacnngtgcacaannctagagcanntttttttttttttttttttttttttttttt

SEQ ID NO: 5936 - DNA, 84 bp, Artificial
  Barcode component
  misc_feature (33)..(34): n is a, c, g, or t
  misc_feature (43)..(44): n is a, c, g, or t
  misc_feature (53)..(54): n is a, c, g, or t
tttttttaagcagtggtatcaacgcagagtacnngtgcacaanncttctagcnntttttttttttttttttttttttttttttt

SEQ ID NO: 5937 - DNA, 84 bp, Artificial
  Barcode component
  misc_feature (33)..(34): n is a, c, g, or t
  misc_feature (43)..(44): n is a, c, g, or t
  misc_feature (53)..(54): n is a, c, g, or t
tttttttaagcagtggtatcaacgcagagtacnngtgcacaanngagtaacgnntttttttttttttttttttttttttttttt

SEQ ID NO: 5938 - DNA, 84 bp, Artificial
  Barcode component
  misc_feature (33)..(34): n is a, c, g, or t
  misc_feature (43)..(44): n is a, c, g, or t
  misc_feature (53)..(54): n is a, c, g, or t
tttttttaagcagtggtatcaacgcagagtacnngtgcacaannctaagaggnntttttttttttttttttttttttttttttt

SEQ ID NO: 5939 - DNA, 84 bp, Artificial
  Barcode component
  misc_feature (33)..(34): n is a, c, g, or t
  misc_feature (43)..(44): n is a, c, g, or t
  misc_feature (53)..(54): n is a, c, g, or t
tttttttaagcagtggtatcaacgcagagtacnngtgcacaannacgtgtagnntttttttttttttttttttttttttttttt

SEQ ID NO: 5940 - DNA, 84 bp, Artificial
  Barcode component
  misc_feature (33)..(34): n is a, c, g, or t
  misc_feature (43)..(44): n is a, c, g, or t
  misc_feature (53)..(54): n is a, c, g, or t
tttttttaagcagtggtatcaacgcagagtacnngtgcacaannactacaggnntttttttttttttttttttttttttttttt

SEQ ID NO: 5941 - DNA, 84 bp, Artificial
  Barcode component
  misc_feature (33)..(34): n is a, c, g, or t
  misc_feature (43)..(44): n is a, c, g, or t
  misc_feature (53)..(54): n is a, c, g, or t
tttttttaagcagtggtatcaacgcagagtacnngtgcacaanntacaggtcnntttttttttttttttttttttttttttttt

SEQ ID NO: 5942 - DNA, 84 bp, Artificial
  Barcode component
  misc_feature (33)..(34): n is a, c, g, or t
  misc_feature (43)..(44): n is a, c, g, or t
  misc_feature (53)..(54): n is a, c, g, or t
tttttttaagcagtggtatcaacgcagagtacnngtgcacaannctcacatgnntttttttttttttttttttttttttttttt

SEQ ID NO: 5943 - DNA, 84 bp, Artificial
  Barcode component
  misc_feature (33)..(34): n is a, c, g, or t
  misc_feature (43)..(44): n is a, c, g, or t
  misc_feature (53)..(54): n is a, c, g, or t
tttttttaagcagtggtatcaacgcagagtacnngtgcacaannactaggagnntttttttttttttttttttttttttttttt

SEQ ID NO: 5944 - DNA, 84 bp, Artificial
  Barcode component
  misc_feature (33)..(34): n is a, c, g, or t
  misc_feature (43)..(44): n is a, c, g, or t
  misc_feature (53)..(54): n is a, c, g, or t
tttttttaagcagtggtatcaacgcagagtacnngtgcacaannccatagganntttttttttttttttttttttttttttttt

SEQ ID NO: 5945 - DNA, 84 bp, Artificial
  Barcode component
  misc_feature (33)..(34): n is a, c, g, or t
  misc_feature (43)..(44): n is a, c, g, or t
  misc_feature (53)..(54): n is a, c, g, or t
tttttttaagcagtggtatcaacgcagagtacnngtgcacaannggagaatcnntttttttttttttttttttttttttttttt

SEQ ID NO: 5946 - DNA, 84 bp, Artificial
  Barcode component
  misc_feature (33)..(34): n is a, c, g, or t
  misc_feature (43)..(44): n is a, c, g, or t
  misc_feature (53)..(54): n is a, c, g, or t
tttttttaagcagtggtatcaacgcagagtacnngtgcacaanngccaagaanntttttttttttttttttttttttttttttt

SEQ ID NO: 5947 - DNA, 84 bp, Artificial
  Barcode component
  misc_feature (33)..(34): n is a, c, g, or t
  misc_feature (43)..(44): n is a, c, g, or t
  misc_feature (53)..(54): n is a, c, g, or t
tttttttaagcagtggtatcaacgcagagtacnngtgcacaannaaggcaagnntttttttttttttttttttttttttttttt

SEQ ID NO: 5948 - DNA, 84 bp, Artificial
  Barcode component
  misc_feature (33)..(34): n is a, c, g, or t
  misc_feature (43)..(44): n is a, c, g, or t
  misc_feature (53)..(54): n is a, c, g, or t
tttttttaagcagtggtatcaacgcagagtacnngtgcacaannaatgtcgcnntttttttttttttttttttttttttttttt

SEQ ID NO: 5949 - DNA, 84 bp, Artificial
  Barcode component
  misc_feature (33)..(34): n is a, c, g, or t
  misc_feature (43)..(44): n is a, c, g, or t
  misc_feature (53)..(54): n is a, c, g, or t
tttttttaagcagtggtatcaacgcagagtacnngtgcacaannatggaaccnntttttttttttttttttttttttttttttt

SEQ ID NO: 5950 - DNA, 84 bp, Artificial
  Barcode component
  misc_feature (33)..(34): n is a, c, g, or t
  misc_feature (43)..(44): n is a, c, g, or t
  misc_feature (53)..(54): n is a, c, g, or t
tttttttaagcagtggtatcaacgcagagtacnngtgcacaannagaggcatnntttttttttttttttttttttttttttttt

SEQ ID NO: 5951 - DNA, 84 bp, Artificial
  Barcode component
  misc_feature (33)..(34): n is a, c, g, or t
  misc_feature (43)..(44): n is a, c, g, or t
  misc_feature (53)..(54): n is a, c, g, or t
tttttttaagcagtggtatcaacgcagagtacnngtgcacaanntgcatagcnntttttttttttttttttttttttttttttt

SEQ ID NO: 5952 - DNA, 84 bp, Artificial
  Barcode component
  misc_feature (33)..(34): n is a, c, g, or t
  misc_feature (43)..(44): n is a, c, g, or t
  misc_feature (53)..(54): n is a, c, g, or t
tttttttaagcagtggtatcaacgcagagtacnngtgcacaannctaacgganntttttttttttttttttttttttttttttt

SEQ ID NO: 5953 - DNA, 84 bp, Artificial
  Barcode component
  misc_feature (33)..(34): n is a, c, g, or t
  misc_feature (43)..(44): n is a, c, g, or t
  misc_feature (53)..(54): n is a, c, g, or t
tttttttaagcagtggtatcaacgcagagtacnngtgcacaanntatcgaggnntttttttttttttttttttttttttttttt

SEQ ID NO: 5954 - DNA, 84 bp, Artificial
  Barcode component
  misc_feature (33)..(34): n is a, c, g, or t
  misc_feature (43)..(44): n is a, c, g, or t
  misc_feature (53)..(54): n is a, c, g, or t
tttttttaagcagtggtatcaacgcagagtacnngtgcacaanncatagcctnntttttttttttttttttttttttttttttt

SEQ ID NO: 5955 - DNA, 84 bp, Artificial
  Barcode component
  misc_feature (33)..(34): n is a, c, g, or t
  misc_feature (43)..(44): n is a, c, g, or t
  misc_feature (53)..(54): n is a, c, g, or t
tttttttaagcagtggtatcaacgcagagtacnngtgcacaannatcgagacnntttttttttttttttttttttttttttttt

SEQ ID NO: 5956 - DNA, 84 bp, Artificial
  Barcode component
  misc_feature (33)..(34): n is a, c, g, or t
  misc_feature (43)..(44): n is a, c, g, or t
  misc_feature (53)..(54): n is a, c, g, or t
tttttttaagcagtggtatcaacgcagagtacnngtgcacaannggaagagtnntttttttttttttttttttttttttttttt

SEQ ID NO: 5957 - DNA, 84 bp, Artificial
  Barcode component
  misc_feature (33)..(34): n is a, c, g, or t
  misc_feature (43)..(44): n is a, c, g, or t
  misc_feature (53)..(54): n is a, c, g, or t
tttttttaagcagtggtatcaacgcagagtacnngtgcacaannccaagtagnntttttttttttttttttttttttttttttt

SEQ ID NO: 5958 - DNA, 84 bp, Artificial
  Barcode component
  misc_feature (33)..(34): n is a, c, g, or t
  misc_feature (43)..(44): n is a, c, g, or t
  misc_feature (53)..(54): n is a, c, g, or t
tttttttaagcagtggtatcaacgcagagtacnngtgcacaannctgaacagnntttttttttttttttttttttttttttttt

SEQ ID NO: 5959 - DNA, 84 bp, Artificial
  Barcode component
  misc_feature (33)..(34): n is a, c, g, or t
  misc_feature (43)..(44): n is a, c, g, or t
  misc_feature (53)..(54): n is a, c, g, or t
tttttttaagcagtggtatcaacgcagagtacnngtgcacaanngtaggttcnntttttttttttttttttttttttttttttt

SEQ ID NO: 5960 - DNA, 84 bp, Artificial
  Barcode component
  misc_feature (33)..(34): n is a, c, g, or t
  misc_feature (43)..(44): n is a, c, g, or t
  misc_feature (53)..(54): n is a, c, g, or t
tttttttaagcagtggtatcaacgcagagtacnngtgcacaanngtatggacnntttttttttttttttttttttttttttttt

SEQ ID NO: 5961 - DNA, 84 bp, Artificial
  Barcode component
  misc_feature (33)..(34): n is a, c, g, or t
  misc_feature (43)..(44): n is a, c, g, or t
  misc_feature (53)..(54): n is a, c, g, or t
tttttttaagcagtggtatcaacgcagagtacnngtgcacaanntcgcaacanntttttttttttttttttttttttttttttt

SEQ ID NO: 5962 - DNA, 84 bp, Artificial
  Barcode component
  misc_feature (33)..(34): n is a, c, g, or t
  misc_feature (43)..(44): n is a, c, g, or t
  misc_feature (53)..(54): n is a, c, g, or t
tttttttaagcagtggtatcaacgcagagtacnngtgcacaannccgctaatnntttttttttttttttttttttttttttttt

SEQ ID NO: 5963 - DNA, 84 bp, Artificial
  Barcode component
  misc_feature (33)..(34): n is a, c, g, or t
  misc_feature (43)..(44): n is a, c, g, or t
  misc_feature (53)..(54): n is a, c, g, or t
tttttttaagcagtggtatcaacgcagagtacnngtgcacaanngattcgcanntttttttttttttttttttttttttttttt

SEQ ID NO: 5964 - DNA, 84 bp, Artificial
  Barcode component
  misc_feature (33)..(34): n is a, c, g, or t
  misc_feature (43)..(44): n is a, c, g, or t
  misc_feature (53)..(54): n is a, c, g, or t
tttttttaagcagtggtatcaacgcagagtacnngtgcacaanncgatggaanntttttttttttttttttttttttttttttt

SEQ ID NO: 5965 - DNA, 84 bp, Artificial
  Barcode component
  misc_feature (33)..(34): n is a, c, g, or t
  misc_feature (43)..(44): n is a, c, g, or t
  misc_feature (53)..(54): n is a, c, g, or t
tttttttaagcagtggtatcaacgcagagtacnngtgcacaannagcaagganntttttttttttttttttttttttttttttt

SEQ ID NO: 5966 - DNA, 84 bp, Artificial
  Barcode component
  misc_feature (33)..(34): n is a, c, g, or t
  misc_feature (43)..(44): n is a, c, g, or t
  misc_feature (53)..(54): n is a, c, g, or t
tttttttaagcagtggtatcaacgcagagtacnngtgcacaanncgtagcaanntttttttttttttttttttttttttttttt

SEQ ID NO: 5967 - DNA, 84 bp, Artificial
  Barcode component
  misc_feature (33)..(34): n is a, c, g, or t
  misc_feature (43)..(44): n is a, c, g, or t
  misc_feature (53)..(54): n is a, c, g, or t
tttttttaagcagtggtatcaacgcagagtacnngtgcacaanntggcagtanntttttttttttttttttttttttttttttt

SEQ ID NO: 5968 - DNA, 84 bp, Artificial
  Barcode component
  misc_feature (33)..(34): n is a, c, g, or t
  misc_feature (43)..(44): n is a, c, g, or t
  misc_feature (53)..(54): n is a, c, g, or t
tttttttaagcagtggtatcaacgcagagtacnngtgcacaanncggtagttnntttttttttttttttttttttttttttttt

SEQ ID NO: 5969 - DNA, 84 bp, Artificial
  Barcode component
  misc_feature (33)..(34): n is a, c, g, or t
  misc_feature (43)..(44): n is a, c, g, or t
  misc_feature (53)..(54): n is a, c, g, or t
tttttttaagcagtggtatcaacgcagagtacnngtgcacaanntgacttcgnntttttttttttttttttttttttttttttt

SEQ ID NO: 5970 - DNA, 84 bp, Artificial
  Barcode component
  misc_feature (33)..(34): n is a, c, g, or t
  misc_feature (43)..(44): n is a, c, g, or t
  misc_feature (53)..(54): n is a, c, g, or t
tttttttaagcagtggtatcaacgcagagtacnngtgcacaanngagtgcaanntttttttttttttttttttttttttttttt

SEQ ID NO: 5971 - DNA, 84 bp, Artificial
  Barcode component
  misc_feature (33)..(34): n is a, c, g, or t
  misc_feature (43)..(44): n is a, c, g, or t
  misc_feature (53)..(54): n is a, c, g, or t
tttttttaagcagtggtatcaacgcagagtacnngtgcacaannacggtaacnntttttttttttttttttttttttttttttt

SEQ ID NO: 5972 - DNA, 84 bp, Artificial
  Barcode component
  misc_feature (33)..(34): n is a, c, g, or t
  misc_feature (43)..(44): n is a, c, g, or t
  misc_feature (53)..(54): n is a, c, g, or t
tttttttaagcagtggtatcaacgcagagtacnngtgcacaannaagtggtgnntttttttttttttttttttttttttttttt

SEQ ID NO: 5973 - DNA, 84 bp, Artificial
  Barcode component
  misc_feature (33)..(34): n is a, c, g, or t
  misc_feature (43)..(44): n is a, c, g, or t
  misc_feature (53)..(54): n is a, c, g, or t
tttttttaagcagtggtatcaacgcagagtacnngtgcacaannggagacaanntttttttttttttttttttttttttttttt

SEQ ID NO: 5974 - DNA, 84 bp, Artificial
  Barcode component
  misc_feature (33)..(34): n is a, c, g, or t
  misc_feature (43)..(44): n is a, c, g, or t
  misc_feature (53)..(54): n is a, c, g, or t
tttttttaagcagtggtatcaacgcagagtacnngtgcacaanntcaaggacnntttttttttttttttttttttttttttttt

SEQ ID NO: 5975 - DNA, 84 bp, Artificial
  Barcode component
  misc_feature (33)..(34): n is a, c, g, or t
  misc_feature (43)..(44): n is a, c, g, or t
  misc_feature (53)..(54): n is a, c, g, or t
tttttttaagcagtggtatcaacgcagagtacnngtgcacaannaagagagcnntttttttttttttttttttttttttttttt

SEQ ID NO: 5976 - DNA, 84 bp, Artificial
  Barcode component
  misc_feature (33)..(34): n is a, c, g, or t
  misc_feature (43)..(44): n is a, c, g, or t
  misc_feature (53)..(54): n is a, c, g, or t
tttttttaagcagtggtatcaacgcagagtacnngtgcacaanncgagagatnntttttttttttttttttttttttttttttt

SEQ ID NO: 5977 - DNA, 84 bp, Artificial
  Barcode component
  misc_feature (33)..(34): n is a, c, g, or t
  misc_feature (43)..(44): n is a, c, g, or t
  misc_feature (53)..(54): n is a, c, g, or t
tttttttaagcagtggtatcaacgcagagtacnngtgcacaannacagatggnntttttttttttttttttttttttttttttt

SEQ ID NO: 5978 - DNA, 84 bp, Artificial
  Barcode component
  misc_feature (33)..(34): n is a, c, g, or t
  misc_feature (43)..(44): n is a, c, g, or t
  misc_feature (53)..(54): n is a, c, g, or t
tttttttaagcagtggtatcaacgcagagtacnngtgcacaannaggagtcanntttttttttttttttttttttttttttttt

SEQ ID NO: 5979 - DNA, 84 bp, Artificial
  Barcode component
  misc_feature (33)..(34): n is a, c, g, or t
  misc_feature (43)..(44): n is a, c, g, or t
  misc_feature (53)..(54): n is a, c, g, or t
tttttttaagcagtggtatcaacgcagagtacnngtgcacaanncgtgttacnntttttttttttttttttttttttttttttt

SEQ ID NO: 5980 - DNA, 84 bp, Artificial
  Barcode component
  misc_feature (33)..(34): n is a, c, g, or t
  misc_feature (43)..(44): n is a, c, g, or t
  misc_feature (53)..(54): n is a, c, g, or t
tttttttaagcagtggtatcaacgcagagtacnngtgcacaanntagtgtgcnntttttttttttttttttttttttttttttt

SEQ ID NO: 5981 - DNA, 84 bp, Artificial
  Barcode component
  misc_feature (33)..(34): n is a, c, g, or t
  misc_feature (43)..(44): n is a, c, g, or t
  misc_feature (53)..(54): n is a, c, g, or t
tttttttaagcagtggtatcaacgcagagtacnngtgcacaannctcatgacnntttttttttttttttttttttttttttttt

SEQ ID NO: 5982 - DNA, 84 bp, Artificial
  Barcode component
  misc_feature (33)..(34): n is a, c, g, or t
  misc_feature (43)..(44): n is a, c, g, or t
  misc_feature (53)..(54): n is a, c, g, or t
tttttttaagcagtggtatcaacgcagagtacnngtgcacaanngtatccagnntttttttttttttttttttttttttttttt

SEQ ID NO: 5983 - DNA, 84 bp, Artificial
  Barcode component
  misc_feature (33)..(34): n is a, c, g, or t
  misc_feature (43)..(44): n is a, c, g, or t
  misc_feature (53)..(54): n is a, c, g, or t
tttttttaagcagtggtatcaacgcagagtacnngtgcacaannacgcctatnntttttttttttttttttttttttttttttt

SEQ ID NO: 5984 - DNA, 84 bp, Artificial
  Barcode component
  misc_feature (33)..(34): n is a, c, g, or t
  misc_feature (43)..(44): n is a, c, g, or t
  misc_feature (53)..(54): n is a, c, g, or t
tttttttaagcagtggtatcaacgcagagtacnngtgcacaannaacgacctnntttttttttttttttttttttttttttttt

SEQ ID NO: 5985 - DNA, 84 bp, Artificial
  Barcode component
  misc_feature (33)..(34): n is a, c, g, or t
  misc_feature (43)..(44): n is a, c, g, or t
  misc_feature (53)..(54): n is a, c, g, or t
tttttttaagcagtggtatcaacgcagagtacnngtgcacaannatcaggctnntttttttttttttttttttttttttttttt

SEQ ID NO: 5986 - DNA, 84 bp, Artificial
  Barcode component
  misc_feature (33)..(34): n is a, c, g, or t
  misc_feature (43)..(44): n is a, c, g, or t
  misc_feature (53)..(54): n is a, c, g, or t
tttttttaagcagtggtatcaacgcagagtacnngtgcacaanncaagttcgnntttttttttttttttttttttttttttttt

SEQ ID NO: 5987 - DNA, 84 bp, Artificial
  Barcode component
  misc_feature (33)..(34): n is a, c, g, or t
  misc_feature (43)..(44): n is a, c, g, or t
  misc_feature (53)..(54): n is a, c, g, or t
tttttttaagcagtggtatcaacgcagagtacnngtgcacaanntagccaganntttttttttttttttttttttttttttttt

SEQ ID NO: 5988 - DNA, 84 bp, Artificial
  Barcode component
  misc_feature (33)..(34): n is a, c, g, or t
  misc_feature (43)..(44): n is a, c, g, or t
  misc_feature (53)..(54): n is a, c, g, or t
tttttttaagcagtggtatcaacgcagagtacnngtgcacaanncaatcacgnntttttttttttttttttttttttttttttt

SEQ ID NO: 5989 - DNA, 84 bp, Artificial
  Barcode component
  misc_feature (33)..(34): n is a, c, g, or t
  misc_feature (43)..(44): n is a, c, g, or t
  misc_feature (53)..(54): n is a, c, g, or t
tttttttaagcagtggtatcaacgcagagtacnngtgcacaanngcaacaagnntttttttttttttttttttttttttttttt

SEQ ID NO: 5990 - DNA, 84 bp, Artificial
  Barcode component
  misc_feature (33)..(34): n is a, c, g, or t
  misc_feature (43)..(44): n is a, c, g, or t
  misc_feature (53)..(54): n is a, c, g, or t
tttttttaagcagtggtatcaacgcagagtacnngtgcacaanncacgacaanntttttttttttttttttttttttttttttt

SEQ ID NO: 5991 - DNA, 84 bp, Artificial
  Barcode component
  misc_feature (33)..(34): n is a, c, g, or t
  misc_feature (43)..(44): n is a, c, g, or t
  misc_feature (53)..(54): n is a, c, g, or t
tttttttaagcagtggtatcaacgcagagtacnngtgcacaanntacggaganntttttttttttttttttttttttttttttt

SEQ ID NO: 5992 - DNA, 84 bp, Artificial
  Barcode component
  misc_feature (33)..(34): n is a, c, g, or t
  misc_feature (43)..(44): n is a, c, g, or t
  misc_feature (53)..(54): n is a, c, g, or t
tttttttaagcagtggtatcaacgcagagtacnngtgcacaanncgacaaganntttttttttttttttttttttttttttttt

SEQ ID NO: 5993 - DNA, 84 bp, Artificial
  Barcode component
  misc_feature (33)..(34): n is a, c, g, or t
  misc_feature (43)..(44): n is a, c, g, or t
  misc_feature (53)..(54): n is a, c, g, or t
tttttttaagcagtggtatcaacgcagagtacnngtgcacaanncgaagtganntttttttttttttttttttttttttttttt

SEQ ID NO: 5994 - DNA, 84 bp, Artificial
  Barcode component
  misc_feature (33)..(34): n is a, c, g, or t
  misc_feature (43)..(44): n is a, c, g, or t
  misc_feature (53)..(54): n is a, c, g, or t
tttttttaagcagtggtatcaacgcagagtacnngtgcacaannagctggtanntttttttttttttttttttttttttttttt

SEQ ID NO: 5995 - DNA, 84 bp, Artificial
  Barcode component
  misc_feature (33)..(34): n is a, c, g, or t
  misc_feature (43)..(44): n is a, c, g, or t
  misc_feature (53)..(54): n is a, c, g, or t
tttttttaagcagtggtatcaacgcagagtacnngtgcacaannaactaggcnntttttttttttttttttttttttttttttt

SEQ ID NO: 5996 - DNA, 84 bp, Artificial
  Barcode component
  misc_feature (33)..(34): n is a, c, g, or t
  misc_feature (43)..(44): n is a, c, g, or t
  misc_feature (53)..(54): n is a, c, g, or t
tttttttaagcagtggtatcaacgcagagtacnngtgcacaanncagcaagtnntttttttttttttttttttttttttttttt

SEQ ID NO: 5997 - DNA, 84 bp, Artificial
  Barcode component
  misc_feature (33)..(34): n is a, c, g, or t
  misc_feature (43)..(44): n is a, c, g, or t
  misc_feature (53)..(54): n is a, c, g, or t
tttttttaagcagtggtatcaacgcagagtacnngtgcacaannacgaggtanntttttttttttttttttttttttttttttt

SEQ ID NO: 5998 - DNA, 84 bp, Artificial
  Barcode component
  misc_feature (33)..(34): n is a, c, g, or t
  misc_feature (43)..(44): n is a, c, g, or t
  misc_feature (53)..(54): n is a, c, g, or t
tttttttaagcagtggtatcaacgcagagtacnngtgcacaanncatcttccnntttttttttttttttttttttttttttttt

SEQ ID NO: 5999 - DNA, 84 bp, Artificial
  Barcode component
  misc_feature (33)..(34): n is a, c, g, or t
  misc_feature (43)..(44): n is a, c, g, or t
  misc_feature (53)..(54): n is a, c, g, or t
tttttttaagcagtggtatcaacgcagagtacnngtgcacaanncctgaatcnntttttttttttttttttttttttttttttt

SEQ ID NO: 6000 - DNA, 84 bp, Artificial
  Barcode component
  misc_feature (33)..(34): n is a, c, g, or t
  misc_feature (43)..(44): n is a, c, g, or t
  misc_feature (53)..(54): n is a, c, g, or t
tttttttaagcagtggtatcaacgcagagtacnngtgcacaanntgcagactnntttttttttttttttttttttttttttttt

SEQ ID NO: 6001 - DNA, 84 bp, Artificial
  Barcode component
  misc_feature (33)..(34): n is a, c, g, or t
  misc_feature (43)..(44): n is a, c, g, or t
  misc_feature (53)..(54): n is a, c, g, or t
tttttttaagcagtggtatcaacgcagagtacnngtgcacaannagatgtggnntttttttttttttttttttttttttttttt

SEQ ID NO: 6002 - DNA, 84 bp, Artificial
  Barcode component
  misc_feature (33)..(34): n is a, c, g, or t
  misc_feature (43)..(44): n is a, c, g, or t
  misc_feature (53)..(54): n is a, c, g, or t
tttttttaagcagtggtatcaacgcagagtacnngtgcacaannagttcgacnntttttttttttttttttttttttttttttt

SEQ ID NO: 6003 - DNA, 84 bp, Artificial
  Barcode component
  misc_feature (33)..(34): n is a, c, g, or t
  misc_feature (43)..(44): n is a, c, g, or t
  misc_feature (53)..(54): n is a, c, g, or t
tttttttaagcagtggtatcaacgcagagtacnngtgcacaannacaacctcnntttttttttttttttttttttttttttttt

SEQ ID NO: 6004 - DNA, 84 bp, Artificial
  Barcode component
  misc_feature (33)..(34): n is a, c, g, or t
  misc_feature (43)..(44): n is a, c, g, or t
  misc_feature (53)..(54): n is a, c, g, or t
tttttttaagcagtggtatcaacgcagagtacnngtgcacaanncatggtagnntttttttttttttttttttttttttttttt

SEQ ID NO: 6005 - DNA, 84 bp, Artificial
  Barcode component
  misc_feature (33)..(34): n is a, c, g, or t
  misc_feature (43)..(44): n is a, c, g, or t
  misc_feature (53)..(54): n is a, c, g, or t
tttttttaagcagtggtatcaacgcagagtacnngtgcacaanncgtatctcnntttttttttttttttttttttttttttttt

SEQ ID NO: 6006 - DNA, 84 bp, Artificial
  Barcode component
  misc_feature (33)..(34): n is a, c, g, or t
  misc_feature (43)..(44): n is a, c, g, or t
  misc_feature (53)..(54): n is a, c, g, or t
tttttttaagcagtggtatcaacgcagagtacnngtgcacaanncctagttcnntttttttttttttttttttttttttttttt

SEQ ID NO: 6007 - DNA, 84 bp, Artificial
  Barcode component
  misc_feature (33)..(34): n is a, c, g, or t
  misc_feature (43)..(44): n is a, c, g, or t
  misc_feature (53)..(54): n is a, c, g, or t
tttttttaagcagtggtatcaacgcagagtacnngtgcacaanncaagagtcnntttttttttttttttttttttttttttttt

SEQ ID NO: 6008 - DNA, 84 bp, Artificial
  Barcode component
  misc_feature (33)..(34): n is a, c, g, or t
  misc_feature (43)..(44): n is a, c, g, or t
  misc_feature (53)..(54): n is a, c, g, or t
tttttttaagcagtggtatcaacgcagagtacnncctatccannaatcggcanntttttttttttttttttttttttttttttt

SEQ ID NO: 6009 - DNA, 84 bp, Artificial
  Barcode component
  misc_feature (33)..(34): n is a, c, g, or t
  misc_feature (43)..(44): n is a, c, g, or t
  misc_feature (53)..(54): n is a, c, g, or t
tttttttaagcagtggtatcaacgcagagtacnncctatccanntacggcatnntttttttttttttttttttttttttttttt

SEQ ID NO: 6010 - DNA, 84 bp, Artificial
  Barcode component
  misc_feature (33)..(34): n is a, c, g, or t
  misc_feature (43)..(44): n is a, c, g, or t
  misc_feature (53)..(54): n is a, c, g, or t
tttttttaagcagtggtatcaacgcagagtacnncctatccannttggatcgnntttttttttttttttttttttttttttttt

SEQ ID NO: 6011 - DNA, 84 bp, Artificial
  Barcode component
  misc_feature (33)..(34): n is a, c, g, or t
  misc_feature (43)..(44): n is a, c, g, or t
  misc_feature (53)..(54): n is a, c, g, or t
tttttttaagcagtggtatcaacgcagagtacnncctatccanntggaacganntttttttttttttttttttttttttttttt

SEQ ID NO: 6012 - DNA, 84 bp, Artificial
  Barcode component
  misc_feature (33)..(34): n is a, c, g, or t
  misc_feature (43)..(44): n is a, c, g, or t
  misc_feature (53)..(54): n is a, c, g, or t
tttttttaagcagtggtatcaacgcagagtacnncctatccannggcaatcanntttttttttttttttttttttttttttttt

SEQ ID NO: 6013 - DNA, 84 bp, Artificial
  Barcode component
  misc_feature (33)..(34): n is a, c, g, or t
  misc_feature (43)..(44): n is a, c, g, or t
  misc_feature (53)..(54): n is a, c, g, or t
tttttttaagcagtggtatcaacgcagagtacnncctatccanngaatccganntttttttttttttttttttttttttttttt

SEQ ID NO: 6014 - DNA, 84 bp, Artificial
  Barcode component
  misc_feature (33)..(34): n is a, c, g, or t
  misc_feature (43)..(44): n is a, c, g, or t
  misc_feature (53)..(54): n is a, c, g, or t
tttttttaagcagtggtatcaacgcagagtacnncctatccannttacggtgnntttttttttttttttttttttttttttttt

SEQ ID NO: 6015 - DNA, 84 bp, Artificial
  Barcode component
  misc_feature (33)..(34): n is a, c, g, or t
  misc_feature (43)..(44): n is a, c, g, or t
  misc_feature (53)..(54): n is a, c, g, or t
tttttttaagcagtggtatcaacgcagagtacnncctatccanncatatcggnntttttttttttttttttttttttttttttt

SEQ ID NO: 6016 - DNA, 84 bp, Artificial
  Barcode component
  misc_feature (33)..(34): n is a, c, g, or t
  misc_feature (43)..(44): n is a, c, g, or t
  misc_feature (53)..(54): n is a, c, g, or t
tttttttaagcagtggtatcaacgcagagtacnncctatccanncttcggtanntttttttttttttttttttttttttttttt

SEQ ID NO: 6017 - DNA, 84 bp, Artificial
  Barcode component
  misc_feature (33)..(34): n is a, c, g, or t
  misc_feature (43)..(44): n is a, c, g, or t
  misc_feature (53)..(54): n is a, c, g, or t
tttttttaagcagtggtatcaacgcagagtacnncctatccanntcctaacgnntttttttttttttttttttttttttttttt

SEQ ID NO: 6018 - DNA, 84 bp, Artificial
  Barcode component
  misc_feature (33)..(34): n is a, c, g, or t
  misc_feature (43)..(44): n is a, c, g, or t
  misc_feature (53)..(54): n is a, c, g, or t
tttttttaagcagtggtatcaacgcagagtacnncctatccanngtaagccanntttttttttttttttttttttttttttttt

SEQ ID NO: 6019 - DNA, 84 bp, Artificial
  Barcode component
  misc_feature (33)..(34): n is a, c, g, or t
  misc_feature (43)..(44): n is a, c, g, or t
  misc_feature (53)..(54): n is a, c, g, or t
tttttttaagcagtggtatcaacgcagagtacnncctatccanntaaggtggnntttttttttttttttttttttttttttttt

SEQ ID NO: 6020 - DNA, 84 bp, Artificial
  Barcode component
  misc_feature (33)..(34): n is a, c, g, or t
  misc_feature (43)..(44): n is a, c, g, or t
  misc_feature (53)..(54): n is a, c, g, or t
tttttttaagcagtggtatcaacgcagagtacnncctatccannggtaagctnntttttttttttttttttttttttttttttt

SEQ ID NO: 6021 - DNA, 84 bp, Artificial
  Barcode component
  misc_feature (33)..(34): n is a, c, g, or t
  misc_feature (43)..(44): n is a, c, g, or t
  misc_feature (53)..(54): n is a, c, g, or t
tttttttaagcagtggtatcaacgcagagtacnncctatccanntgtgtcganntttttttttttttttttttttttttttttt

SEQ ID NO: 6022 - DNA, 84 bp, Artificial
  Barcode component
  misc_feature (33)..(34): n is a, c, g, or t
  misc_feature (43)..(44): n is a, c, g, or t
  misc_feature (53)..(54): n is a, c, g, or t
tttttttaagcagtggtatcaacgcagagtacnncctatccanngagcatganntttttttttttttttttttttttttttttt

SEQ ID NO: 6023 - DNA, 84 bp, Artificial
  Barcode component
  misc_feature (33)..(34): n is a, c, g, or t
  misc_feature (43)..(44): n is a, c, g, or t
  misc_feature (53)..(54): n is a, c, g, or t
tttttttaagcagtggtatcaacgcagagtacnncctatccanntcgaagtcnntttttttttttttttttttttttttttttt

SEQ ID NO: 6024 - DNA, 84 bp, Artificial
  Barcode component
  misc_feature (33)..(34): n is a, c, g, or t
  misc_feature (43)..(44): n is a, c, g, or t
  misc_feature (53)..(54): n is a, c, g, or t
tttttttaagcagtggtatcaacgcagagtacnncctatccannggtgaacanntttttttttttttttttttttttttttttt

SEQ ID NO: 6025 - DNA, 84 bp, Artificial
  Barcode component
  misc_feature (33)..(34): n is a, c, g, or t
  misc_feature (43)..(44): n is a, c, g, or t
  misc_feature (53)..(54): n is a, c, g, or t
tttttttaagcagtggtatcaacgcagagtacnncctatccannacatgcacnntttttttttttttttttttttttttttttt

SEQ ID NO: 6026 - DNA, 84 bp, Artificial
  Barcode component
  misc_feature (33)..(34): n is a, c, g, or t
  misc_feature (43)..(44): n is a, c, g, or t
  misc_feature (53)..(54): n is a, c, g, or t
tttttttaagcagtggtatcaacgcagagtacnncctatccannccaacagtnntttttttttttttttttttttttttttttt

SEQ ID NO: 6027 - DNA, 84 bp, Artificial
  Barcode component
  misc_feature (33)..(34): n is a, c, g, or t
  misc_feature (43)..(44): n is a, c, g, or t
  misc_feature (53)..(54): n is a, c, g, or t
tttttttaagcagtggtatcaacgcagagtacnncctatccannagaacagcnntttttttttttttttttttttttttttttt

SEQ ID NO: 6028 - DNA, 84 bp, Artificial
  Barcode component
  misc_feature (33)..(34): n is a, c, g, or t
  misc_feature (43)..(44): n is a, c, g, or t
  misc_feature (53)..(54): n is a, c, g, or t
tttttttaagcagtggtatcaacgcagagtacnncctatccanngaacacgtnntttttttttttttttttttttttttttttt

SEQ ID NO: 6029 - DNA, 84 bp, Artificial
  Barcode component
  misc_feature (33)..(34): n is a, c, g, or t
  misc_feature (43)..(44): n is a, c, g, or t
  misc_feature (53)..(54): n is a, c, g, or t
tttttttaagcagtggtatcaacgcagagtacnncctatccannggtcttcanntttttttttttttttttttttttttttttt

SEQ ID NO: 6030 - DNA, 84 bp, Artificial
  Barcode component
  misc_feature (33)..(34): n is a, c, g, or t
  misc_feature (43)..(44): n is a, c, g, or t
  misc_feature (53)..(54): n is a, c, g, or t
tttttttaagcagtggtatcaacgcagagtacnncctatccannaggttcagnntttttttttttttttttttttttttttttt

SEQ ID NO: 6031 - DNA, 84 bp, Artificial
  Barcode component
  misc_feature (33)..(34): n is a, c, g, or t
  misc_feature (43)..(44): n is a, c, g, or t
  misc_feature (53)..(54): n is a, c, g, or t
tttttttaagcagtggtatcaacgcagagtacnncctatccannctagagcanntttttttttttttttttttttttttttttt

SEQ ID NO: 6032 - DNA, 84 bp, Artificial
  Barcode component
  misc_feature (33)..(34): n is a, c, g, or t
  misc_feature (43)..(44): n is a, c, g, or t
  misc_feature (53)..(54): n is a, c, g, or t
tttttttaagcagtggtatcaacgcagagtacnncctatccanncttctagcnntttttttttttttttttttttttttttttt

SEQ ID NO: 6033 - DNA, 84 bp, Artificial
  Barcode component
  misc_feature (33)..(34): n is a, c, g, or t
  misc_feature (43)..(44): n is a, c, g, or t
  misc_feature (53)..(54): n is a, c, g, or t
tttttttaagcagtggtatcaacgcagagtacnncctatccanngagtaacgnntttttttttttttttttttttttttttttt

SEQ ID NO: 6034 - DNA, 84 bp, Artificial
  Barcode component
  misc_feature (33)..(34): n is a, c, g, or t
  misc_feature (43)..(44): n is a, c, g, or t
  misc_feature (53)..(54): n is a, c, g, or t
tttttttaagcagtggtatcaacgcagagtacnncctatccannctaagaggnntttttttttttttttttttttttttttttt

SEQ ID NO: 6035 - DNA, 84 bp, Artificial
  Barcode component
  misc_feature (33)..(34): n is a, c, g, or t
  misc_feature (43)..(44): n is a, c, g, or t
  misc_feature (53)..(54): n is a, c, g, or t
tttttttaagcagtggtatcaacgcagagtacnncctatccannacgtgtagnntttttttttttttttttttttttttttttt

SEQ ID NO: 6036 - DNA, 84 bp, Artificial
  Barcode component
  misc_feature (33)..(34): n is a, c, g, or t
  misc_feature (43)..(44): n is a, c, g, or t
  misc_feature (53)..(54): n is a, c, g, or t
tttttttaagcagtggtatcaacgcagagtacnncctatccannactacaggnntttttttttttttttttttttttttttttt

SEQ ID NO: 6037 - DNA, 84 bp, Artificial
  Barcode component
  misc_feature (33)..(34): n is a, c, g, or t
  misc_feature (43)..(44): n is a, c, g, or t
  misc_feature (53)..(54): n is a, c, g, or t
tttttttaagcagtggtatcaacgcagagtacnncctatccanntacaggtcnntttttttttttttttttttttttttttttt

SEQ ID NO: 6038 - DNA, 84 bp, Artificial
  Barcode component
  misc_feature (33)..(34): n is a, c, g, or t
  misc_feature (43)..(44): n is a, c, g, or t
  misc_feature (53)..(54): n is a, c, g, or t
tttttttaagcagtggtatcaacgcagagtacnncctatccannctcacatgnntttttttttttttttttttttttttttttt

SEQ ID NO: 6039 - DNA, 84 bp, Artificial
  Barcode component
  misc_feature (33)..(34): n is a, c, g, or t
  misc_feature (43)..(44): n is a, c, g, or t
  misc_feature (53)..(54): n is a, c, g, or t
tttttttaagcagtggtatcaacgcagagtacnncctatccannactaggagnntttttttttttttttttttttttttttttt

SEQ ID NO: 6040 - DNA, 84 bp, Artificial
  Barcode component
  misc_feature (33)..(34): n is a, c, g, or t
  misc_feature (43)..(44): n is a, c, g, or t
  misc_feature (53)..(54): n is a, c, g, or t
tttttttaagcagtggtatcaacgcagagtacnncctatccannccatagganntttttttttttttttttttttttttttttt

SEQ ID NO: 6041 - DNA, 84 bp, Artificial
  Barcode component
  misc_feature (33)..(34): n is a, c, g, or t
  misc_feature (43)..(44): n is a, c, g, or t
  misc_feature (53)..(54): n is a, c, g, or t
tttttttaagcagtggtatcaacgcagagtacnncctatccannggagaatcnntttttttttttttttttttttttttttttt

SEQ ID NO: 6042 - DNA, 84 bp, Artificial
  Barcode component
  misc_feature (33)..(34): n is a, c, g, or t
  misc_feature (43)..(44): n is a, c, g, or t
  misc_feature (53)..(54): n is a, c, g, or t
tttttttaagcagtggtatcaacgcagagtacnncctatccanngccaagaanntttttttttttttttttttttttttttttt

SEQ ID NO: 6043 - DNA, 84 bp, Artificial
  Barcode component
  misc_feature (33)..(34): n is a, c, g, or t
  misc_feature (43)..(44): n is a, c, g, or t
  misc_feature (53)..(54): n is a, c, g, or t
tttttttaagcagtggtatcaacgcagagtacnncctatccannaaggcaagnntttttttttttttttttttttttttttttt

SEQ ID NO: 6044 - DNA, 84 bp, Artificial
  Barcode component
  misc_feature (33)..(34): n is a, c, g, or t
  misc_feature (43)..(44): n is a, c, g, or t
  misc_feature (53)..(54): n is a, c, g, or t
tttttttaagcagtggtatcaacgcagagtacnncctatccannaatgtcgcnntttttttttttttttttttttttttttttt

SEQ ID NO: 6045 - DNA, 84 bp, Artificial
  Barcode component
  misc_feature (33)..(34): n is a, c, g, or t
  misc_feature (43)..(44): n is a, c, g, or t
  misc_feature (53)..(54): n is a, c, g, or t
tttttttaagcagtggtatcaacgcagagtacnncctatccannatggaaccnntttttttttttttttttttttttttttttt

SEQ ID NO: 6046 - DNA, 84 bp, Artificial
  Barcode component
  misc_feature (33)..(34): n is a, c, g, or t
  misc_feature (43)..(44): n is a, c, g, or t
  misc_feature (53)..(54): n is a, c, g, or t
tttttttaagcagtggtatcaacgcagagtacnncctatccannagaggcatnntttttttttttttttttttttttttttttt

SEQ ID NO: 6047 - DNA, 84 bp, Artificial
  Barcode component
  misc_feature (33)..(34): n is a, c, g, or t
  misc_feature (43)..(44): n is a, c, g, or t
  misc_feature (53)..(54): n is a, c, g, or t
tttttttaagcagtggtatcaacgcagagtacnncctatccanntgcatagcnntttttttttttttttttttttttttttttt

SEQ ID NO: 6048 - DNA, 84 bp, Artificial
  Barcode component
  misc_feature (33)..(34): n is a, c, g, or t
  misc_feature (43)..(44): n is a, c, g, or t
  misc_feature (53)..(54): n is a, c, g, or t
tttttttaagcagtggtatcaacgcagagtacnncctatccannctaacgganntttttttttttttttttttttttttttttt

SEQ ID NO: 6049 - DNA, 84 bp, Artificial
  Barcode component
  misc_feature (33)..(34): n is a, c, g, or t
  misc_feature (43)..(44): n is a, c, g, or t
  misc_feature (53)..(54): n is a, c, g, or t
tttttttaagcagtggtatcaacgcagagtacnncctatccanntatcgaggnntttttttttttttttttttttttttttttt

SEQ ID NO: 6050 - DNA, 84 bp, Artificial
  Barcode component
  misc_feature (33)..(34): n is a, c, g, or t
  misc_feature (43)..(44): n is a, c, g, or t
  misc_feature (53)..(54): n is a, c, g, or t
tttttttaagcagtggtatcaacgcagagtacnncctatccanncatagcctnntttttttttttttttttttttttttttttt

SEQ ID NO: 6051 - DNA, 84 bp, Artificial
  Barcode component
  misc_feature (33)..(34): n is a, c, g, or t
  misc_feature (43)..(44): n is a, c, g, or t
  misc_feature (53)..(54): n is a, c, g, or t
tttttttaagcagtggtatcaacgcagagtacnncctatccannatcgagacnntttttttttttttttttttttttttttttt

SEQ ID NO: 6052 - DNA, 84 bp, Artificial
  Barcode component
  misc_feature (33)..(34): n is a, c, g, or t
  misc_feature (43)..(44): n is a, c, g, or t
  misc_feature (53)..(54): n is a, c, g, or t
tttttttaagcagtggtatcaacgcagagtacnncctatccannggaagagtnntttttttttttttttttttttttttttttt

SEQ ID NO: 6053 - DNA, 84 bp, Artificial
  Barcode component
  misc_feature (33)..(34): n is a, c, g, or t
  misc_feature (43)..(44): n is a, c, g, or t
  misc_feature (53)..(54): n is a, c, g, or t
tttttttaagcagtggtatcaacgcagagtacnncctatccannccaagtagnntttttttttttttttttttttttttttttt

SEQ ID NO: 6054 - DNA, 84 bp, Artificial
  Barcode component
  misc_feature (33)..(34): n is a, c, g, or t
  misc_feature (43)..(44): n is a, c, g, or t
  misc_feature (53)..(54): n is a, c, g, or t
tttttttaagcagtggtatcaacgcagagtacnncctatccannctgaacagnntttttttttttttttttttttttttttttt

SEQ ID NO: 6055 - DNA, 84 bp, Artificial
  Barcode component
  misc_feature (33)..(34): n is a, c, g, or t
  misc_feature (43)..(44): n is a, c, g, or t
  misc_feature (53)..(54): n is a, c, g, or t
tttttttaagcagtggtatcaacgcagagtacnncctatccanngtaggttcnntttttttttttttttttttttttttttttt

SEQ ID NO: 6056 - DNA, 84 bp, Artificial
  Barcode component
  misc_feature (33)..(34): n is a, c, g, or t
  misc_feature (43)..(44): n is a, c, g, or t
  misc_feature (53)..(54): n is a, c, g, or t
tttttttaagcagtggtatcaacgcagagtacnncctatccanngtatggacnntttttttttttttttttttttttttttttt

SEQ ID NO: 6057 - DNA, 84 bp, Artificial
  Barcode component
  misc_feature (33)..(34): n is a, c, g, or t
  misc_feature (43)..(44): n is a, c, g, or t
  misc_feature (53)..(54): n is a, c, g, or t
tttttttaagcagtggtatcaacgcagagtacnncctatccanntcgcaacanntttttttttttttttttttttttttttttt

SEQ ID NO: 6058 - DNA, 84 bp, Artificial
  Barcode component
  misc_feature (33)..(34): n is a, c, g, or t
  misc_feature (43)..(44): n is a, c, g, or t
  misc_feature (53)..(54): n is a, c, g, or t
tttttttaagcagtggtatcaacgcagagtacnncctatccannccgctaatnntttttttttttttttttttttttttttttt

SEQ ID NO: 6059 - DNA, 84 bp, Artificial
  Barcode component
  misc_feature (33)..(34): n is a, c, g, or t
  misc_feature (43)..(44): n is a, c, g, or t
  misc_feature (53)..(54): n is a, c, g, or t
tttttttaagcagtggtatcaacgcagagtacnncctatccanngattcgcanntttttttttttttttttttttttttttttt

SEQ ID NO: 6060 - DNA, 84 bp, Artificial
  Barcode component
  misc_feature (33)..(34): n is a, c, g, or t
  misc_feature (43)..(44): n is a, c, g, or t
  misc_feature (53)..(54): n is a, c, g, or t
tttttttaagcagtggtatcaacgcagagtacnncctatccanncgatggaanntttttttttttttttttttttttttttttt

SEQ ID NO: 6061 - DNA, 84 bp, Artificial
  Barcode component
  misc_feature (33)..(34): n is a, c, g, or t
  misc_feature (43)..(44): n is a, c, g, or t
  misc_feature (53)..(54): n is a, c, g, or t
tttttttaagcagtggtatcaacgcagagtacnncctatccannagcaagganntttttttttttttttttttttttttttttt

SEQ ID NO: 6062 - DNA, 84 bp, Artificial
  Barcode component
  misc_feature (33)..(34): n is a, c, g, or t
  misc_feature (43)..(44): n is a, c, g, or t
  misc_feature (53)..(54): n is a, c, g, or t
tttttttaagcagtggtatcaacgcagagtacnncctatccanncgtagcaanntttttttttttttttttttttttttttttt

SEQ ID NO: 6063 - DNA, 84 bp, Artificial
  Barcode component
  misc_feature (33)..(34): n is a, c, g, or t
  misc_feature (43)..(44): n is a, c, g, or t
  misc_feature (53)..(54): n is a, c, g, or t
tttttttaagcagtggtatcaacgcagagtacnncctatccanntggcagtanntttttttttttttttttttttttttttttt

SEQ ID NO: 6064 - DNA, 84 bp, Artificial
  Barcode component
  misc_feature (33)..(34): n is a, c, g, or t
  misc_feature (43)..(44): n is a, c, g, or t
  misc_feature (53)..(54): n is a, c, g, or t
tttttttaagcagtggtatcaacgcagagtacnncctatccanncggtagttnntttttttttttttttttttttttttttttt

SEQ ID NO: 6065 - DNA, 84 bp, Artificial
  Barcode component
  misc_feature (33)..(34): n is a, c, g, or t
  misc_feature (43)..(44): n is a, c, g, or t
  misc_feature (53)..(54): n is a, c, g, or t
tttttttaagcagtggtatcaacgcagagtacnncctatccanntgacttcgnntttttttttttttttttttttttttttttt

SEQ ID NO: 6066 - DNA, 84 bp, Artificial
  Barcode component
  misc_feature (33)..(34): n is a, c, g, or t
  misc_feature (43)..(44): n is a, c, g, or t
  misc_feature (53)..(54): n is a, c, g, or t
tttttttaagcagtggtatcaacgcagagtacnncctatccanngagtgcaanntttttttttttttttttttttttttttttt

SEQ ID NO: 6067 - DNA, 84 bp, Artificial
  Barcode component
  misc_feature (33)..(34): n is a, c, g, or t
  misc_feature (43)..(44): n is a, c, g, or t
  misc_feature (53)..(54): n is a, c, g, or t
tttttttaagcagtggtatcaacgcagagtacnncctatccannacggtaacnntttttttttttttttttttttttttttttt

SEQ ID NO: 6068 - DNA, 84 bp, Artificial
  Barcode component
  misc_feature (33)..(34): n is a, c, g, or t
  misc_feature (43)..(44): n is a, c, g, or t
  misc_feature (53)..(54): n is a, c, g, or t
tttttttaagcagtggtatcaacgcagagtacnncctatccannaagtggtgnntttttttttttttttttttttttttttttt

SEQ ID NO: 6069 - DNA, 84 bp, Artificial
  Barcode component
  misc_feature (33)..(34): n is a, c, g, or t
  misc_feature (43)..(44): n is a, c, g, or t
  misc_feature (53)..(54): n is a, c, g, or t
tttttttaagcagtggtatcaacgcagagtacnncctatccannggagacaanntttttttttttttttttttttttttttttt

SEQ ID NO: 6070 - DNA, 84 bp, Artificial
  Barcode component
  misc_feature (33)..(34): n is a, c, g, or t
  misc_feature (43)..(44): n is a, c, g, or t
  misc_feature (53)..(54): n is a, c, g, or t
tttttttaagcagtggtatcaacgcagagtacnncctatccanntcaaggacnntttttttttttttttttttttttttttttt

SEQ ID NO: 6071 - DNA, 84 bp, Artificial
  Barcode component
  misc_feature (33)..(34): n is a, c, g, or t
  misc_feature (43)..(44): n is a, c, g, or t
  misc_feature (53)..(54): n is a, c, g, or t
tttttttaagcagtggtatcaacgcagagtacnncctatccannaagagagcnntttttttttttttttttttttttttttttt

SEQ ID NO: 6072 - DNA, 84 bp, Artificial
  Barcode component
  misc_feature (33)..(34): n is a, c, g, or t
  misc_feature (43)..(44): n is a, c, g, or t
  misc_feature (53)..(54): n is a, c, g, or t
tttttttaagcagtggtatcaacgcagagtacnncctatccanncgagagatnntttttttttttttttttttttttttttttt

SEQ ID NO: 6073 - DNA, 84 bp, Artificial
  Barcode component
  misc_feature (33)..(34): n is a, c, g, or t
  misc_feature (43)..(44): n is a, c, g, or t
  misc_feature (53)..(54): n is a, c, g, or t
tttttttaagcagtggtatcaacgcagagtacnncctatccannacagatggnntttttttttttttttttttttttttttttt

SEQ ID NO: 6074 - DNA, 84 bp, Artificial
  Barcode component
  misc_feature (33)..(34): n is a, c, g, or t
  misc_feature (43)..(44): n is a, c, g, or t
  misc_feature (53)..(54): n is a, c, g, or t
tttttttaagcagtggtatcaacgcagagtacnncctatccannaggagtcanntttttttttttttttttttttttttttttt

SEQ ID NO: 6075 - DNA, 84 bp, Artificial
  Barcode component
  misc_feature (33)..(34): n is a, c, g, or t
  misc_feature (43)..(44): n is a, c, g, or t
  misc_feature (53)..(54): n is a, c, g, or t
tttttttaagcagtggtatcaacgcagagtacnncctatccanncgtgttacnntttttttttttttttttttttttttttttt

SEQ ID NO: 6076 - DNA, 84 bp, Artificial
  Barcode component
  misc_feature (33)..(34): n is a, c, g, or t
  misc_feature (43)..(44): n is a, c, g, or t
  misc_feature (53)..(54): n is a, c, g, or t
tttttttaagcagtggtatcaacgcagagtacnncctatccanntagtgtgcnntttttttttttttttttttttttttttttt

SEQ ID NO: 6077 - DNA, 84 bp, Artificial
  Barcode component
  misc_feature (33)..(34): n is a, c, g, or t
  misc_feature (43)..(44): n is a, c, g, or t
  misc_feature (53)..(54): n is a, c, g, or t
tttttttaagcagtggtatcaacgcagagtacnncctatccannctcatgacnntttttttttttttttttttttttttttttt

SEQ ID NO: 6078 - DNA, 84 bp, Artificial
  Barcode component
  misc_feature (33)..(34): n is a, c, g, or t
  misc_feature (43)..(44): n is a, c, g, or t
  misc_feature (53)..(54): n is a, c, g, or t
tttttttaagcagtggtatcaacgcagagtacnncctatccanngtatccagnntttttttttttttttttttttttttttttt

SEQ ID NO: 6079 - DNA, 84 bp, Artificial
  Barcode component
  misc_feature (33)..(34): n is a, c, g, or t
  misc_feature (43)..(44): n is a, c, g, or t
  misc_feature (53)..(54): n is a, c, g, or t
tttttttaagcagtggtatcaacgcagagtacnncctatccannacgcctatnntttttttttttttttttttttttttttttt

SEQ ID NO: 6080 - DNA, 84 bp, Artificial
  Barcode component
  misc_feature (33)..(34): n is a, c, g, or t
  misc_feature (43)..(44): n is a, c, g, or t
  misc_feature (53)..(54): n is a, c, g, or t
tttttttaagcagtggtatcaacgcagagtacnncctatccannaacgacctnntttttttttttttttttttttttttttttt

SEQ ID NO: 6081 - DNA, 84 bp, Artificial
  Barcode component
  misc_feature (33)..(34): n is a, c, g, or t
  misc_feature (43)..(44): n is a, c, g, or t
  misc_feature (53)..(54): n is a, c, g, or t
tttttttaagcagtggtatcaacgcagagtacnncctatccannatcaggctnntttttttttttttttttttttttttttttt

SEQ ID NO: 6082 - DNA, 84 bp, Artificial
  Barcode component
  misc_feature (33)..(34): n is a, c, g, or t
  misc_feature (43)..(44): n is a, c, g, or t
  misc_feature (53)..(54): n is a, c, g, or t
tttttttaagcagtggtatcaacgcagagtacnncctatccanncaagttcgnntttttttttttttttttttttttttttttt

SEQ ID NO: 6083 - DNA, 84 bp, Artificial
  Barcode component
  misc_feature (33)..(34): n is a, c, g, or t
  misc_feature (43)..(44): n is a, c, g, or t
  misc_feature (53)..(54): n is a, c, g, or t
tttttttaagcagtggtatcaacgcagagtacnncctatccanntagccaganntttttttttttttttttttttttttttttt

SEQ ID NO: 6084 - DNA, 84 bp, Artificial
  Barcode component
  misc_feature (33)..(34): n is a, c, g, or t
  misc_feature (43)..(44): n is a, c, g, or t
  misc_feature (53)..(54): n is a, c, g, or t
tttttttaagcagtggtatcaacgcagagtacnncctatccanncaatcacgnntttttttttttttttttttttttttttttt

SEQ ID NO: 6085 - DNA, 84 bp, Artificial
  Barcode component
  misc_feature (33)..(34): n is a, c, g, or t
  misc_feature (43)..(44): n is a, c, g, or t
  misc_feature (53)..(54): n is a, c, g, or t
tttttttaagcagtggtatcaacgcagagtacnncctatccanngcaacaagnntttttttttttttttttttttttttttttt

SEQ ID NO: 6086 - DNA, 84 bp, Artificial
  Barcode component
  misc_feature (33)..(34): n is a, c, g, or t
  misc_feature (43)..(44): n is a, c, g, or t
  misc_feature (53)..(54): n is a, c, g, or t
tttttttaagcagtggtatcaacgcagagtacnncctatccanncacgacaanntttttttttttttttttttttttttttttt

SEQ ID NO: 6087 - DNA, 84 bp, Artificial
  Barcode component
  misc_feature (33)..(34): n is a, c, g, or t
  misc_feature (43)..(44): n is a, c, g, or t
  misc_feature (53)..(54): n is a, c, g, or t
tttttttaagcagtggtatcaacgcagagtacnncctatccanntacggaganntttttttttttttttttttttttttttttt

SEQ ID NO: 6088 - DNA, 84 bp, Artificial
  Barcode component
  misc_feature (33)..(34): n is a, c, g, or t
  misc_feature (43)..(44): n is a, c, g, or t
  misc_feature (53)..(54): n is a, c, g, or t
tttttttaagcagtggtatcaacgcagagtacnncctatccanncgacaaganntttttttttttttttttttttttttttttt

SEQ ID NO: 6089 - DNA, 84 bp, Artificial
  Barcode component
  misc_feature (33)..(34): n is a, c, g, or t
  misc_feature (43)..(44): n is a, c, g, or t
  misc_feature (53)..(54): n is a, c, g, or t
tttttttaagcagtggtatcaacgcagagtacnncctatccanncgaagtganntttttttttttttttttttttttttttttt

SEQ ID NO: 6090 - DNA, 84 bp, Artificial
  Barcode component
  misc_feature (33)..(34): n is a, c, g, or t
  misc_feature (43)..(44): n is a, c, g, or t
  misc_feature (53)..(54): n is a, c, g, or t
tttttttaagcagtggtatcaacgcagagtacnncctatccannagctggtanntttttttttttttttttttttttttttttt

SEQ ID NO: 6091 - DNA, 84 bp, Artificial
  Barcode component
  misc_feature (33)..(34): n is a, c, g, or t
  misc_feature (43)..(44): n is a, c, g, or t
  misc_feature (53)..(54): n is a, c, g, or t
tttttttaagcagtggtatcaacgcagagtacnncctatccannaactaggcnntttttttttttttttttttttttttttttt

SEQ ID NO: 6092 - DNA, 84 bp, Artificial
  Barcode component
  misc_feature (33)..(34): n is a, c, g, or t
  misc_feature (43)..(44): n is a, c, g, or t
  misc_feature (53)..(54): n is a, c, g, or t
tttttttaagcagtggtatcaacgcagagtacnncctatccanncagcaagtnntttttttttttttttttttttttttttttt

SEQ ID NO: 6093 - DNA, 84 bp, Artificial
  Barcode component
  misc_feature (33)..(34): n is a, c, g, or t
  misc_feature (43)..(44): n is a, c, g, or t
  misc_feature (53)..(54): n is a, c, g, or t
tttttttaagcagtggtatcaacgcagagtacnncctatccannacgaggtanntttttttttttttttttttttttttttttt

SEQ ID NO: 6094 - DNA, 84 bp, Artificial
  Barcode component
  misc_feature (33)..(34): n is a, c, g, or t
  misc_feature (43)..(44): n is a, c, g, or t
  misc_feature (53)..(54): n is a, c, g, or t
tttttttaagcagtggtatcaacgcagagtacnncctatccanncatcttccnntttttttttttttttttttttttttttttt

SEQ ID NO: 6095 - DNA, 84 bp, Artificial
  Barcode component
  misc_feature (33)..(34): n is a, c, g, or t
  misc_feature (43)..(44): n is a, c, g, or t
  misc_feature (53)..(54): n is a, c, g, or t
tttttttaagcagtggtatcaacgcagagtacnncctatccanncctgaatcnntttttttttttttttttttttttttttttt

SEQ ID NO: 6096 - DNA, 84 bp, Artificial
  Barcode component
  misc_feature (33)..(34): n is a, c, g, or t
  misc_feature (43)..(44): n is a, c, g, or t
  misc_feature (53)..(54): n is a, c, g, or t
tttttttaagcagtggtatcaacgcagagtacnncctatccanntgcagactnntttttttttttttttttttttttttttttt

SEQ ID NO: 6097 - DNA, 84 bp, Artificial
  Barcode component
  misc_feature (33)..(34): n is a, c, g, or t
  misc_feature (43)..(44): n is a, c, g, or t
  misc_feature (53)..(54): n is a, c, g, or t
tttttttaagcagtggtatcaacgcagagtacnncctatccannagatgtggnntttttttttttttttttttttttttttttt

SEQ ID NO: 6098 - DNA, 84 bp, Artificial
  Barcode component
  misc_feature (33)..(34): n is a, c, g, or t
  misc_feature (43)..(44): n is a, c, g, or t
  misc_feature (53)..(54): n is a, c, g, or t
tttttttaagcagtggtatcaacgcagagtacnncctatccannagttcgacnntttttttttttttttttttttttttttttt

SEQ ID NO: 6099 - DNA, 84 bp, Artificial
  Barcode component
  misc_feature (33)..(34): n is a, c, g, or t
  misc_feature (43)..(44): n is a, c, g, or t
  misc_feature (53)..(54): n is a, c, g, or t
tttttttaagcagtggtatcaacgcagagtacnncctatccannacaacctcnntttttttttttttttttttttttttttttt

SEQ ID NO: 6100 - DNA, 84 bp, Artificial
  Barcode component
  misc_feature (33)..(34): n is a, c, g, or t
  misc_feature (43)..(44): n is a, c, g, or t
  misc_feature (53)..(54): n is a, c, g, or t
tttttttaagcagtggtatcaacgcagagtacnncctatccanncatggtagnntttttttttttttttttttttttttttttt

SEQ ID NO: 6101 - DNA, 84 bp, Artificial
  Barcode component
  misc_feature (33)..(34): n is a, c, g, or t
  misc_feature (43)..(44): n is a, c, g, or t
  misc_feature (53)..(54): n is a, c, g, or t
tttttttaagcagtggtatcaacgcagagtacnncctatccanncgtatctcnntttttttttttttttttttttttttttttt

SEQ ID NO: 6102 - DNA, 84 bp, Artificial
  Barcode component
  misc_feature (33)..(34): n is a, c, g, or t
  misc_feature (43)..(44): n is a, c, g, or t
  misc_feature (53)..(54): n is a, c, g, or t
tttttttaagcagtggtatcaacgcagagtacnncctatccanncctagttcnntttttttttttttttttttttttttttttt

SEQ ID NO: 6103 - DNA, 84 bp, Artificial
  Barcode component
  misc_feature (33)..(34): n is a, c, g, or t
  misc_feature (43)..(44): n is a, c, g, or t
  misc_feature (53)..(54): n is a, c, g, or t
tttttttaagcagtggtatcaacgcagagtacnncctatccanncaagagtcnntttttttttttttttttttttttttttttt

SEQ ID NO: 6104 - DNA, 84 bp, Artificial
  Barcode component
  misc_feature (33)..(34): n is a, c, g, or t
  misc_feature (43)..(44): n is a, c, g, or t
  misc_feature (53)..(54): n is a, c, g, or t
tttttttaagcagtggtatcaacgcagagtacnncttggacannaatcggcanntttttttttttttttttttttttttttttt

SEQ ID NO: 6105 - DNA, 84 bp, Artificial
  Barcode component
  misc_feature (33)..(34): n is a, c, g, or t
  misc_feature (43)..(44): n is a, c, g, or t
  misc_feature (53)..(54): n is a, c, g, or t
tttttttaagcagtggtatcaacgcagagtacnncttggacanntacggcatnntttttttttttttttttttttttttttttt

SEQ ID NO: 6106 - DNA, 84 bp, Artificial
  Barcode component
  misc_feature (33)..(34): n is a, c, g, or t
  misc_feature (43)..(44): n is a, c, g, or t
  misc_feature (53)..(54): n is a, c, g, or t
tttttttaagcagtggtatcaacgcagagtacnncttggacannttggatcgnntttttttttttttttttttttttttttttt

SEQ ID NO: 6107 - DNA, 84 bp, Artificial
  Barcode component
  misc_feature (33)..(34): n is a, c, g, or t
  misc_feature (43)..(44): n is a, c, g, or t
  misc_feature (53)..(54): n is a, c, g, or t
tttttttaagcagtggtatcaacgcagagtacnncttggacanntggaacganntttttttttttttttttttttttttttttt

SEQ ID NO: 6108 - DNA, 84 bp, Artificial
  Barcode component
  misc_feature (33)..(34): n is a, c, g, or t
  misc_feature (43)..(44): n is a, c, g, or t
  misc_feature (53)..(54): n is a, c, g, or t
tttttttaagcagtggtatcaacgcagagtacnncttggacannggcaatcanntttttttttttttttttttttttttttttt

SEQ ID NO: 6109 - DNA, 84 bp, Artificial
  Barcode component
  misc_feature (33)..(34): n is a, c, g, or t
  misc_feature (43)..(44): n is a, c, g, or t
  misc_feature (53)..(54): n is a, c, g, or t
tttttttaagcagtggtatcaacgcagagtacnncttggacanngaatccganntttttttttttttttttttttttttttttt

SEQ ID NO: 6110 - DNA, 84 bp, Artificial
  Barcode component
  misc_feature (33)..(34): n is a, c, g, or t
  misc_feature (43)..(44): n is a, c, g, or t
  misc_feature (53)..(54): n is a, c, g, or t
tttttttaagcagtggtatcaacgcagagtacnncttggacannttacggtgnntttttttttttttttttttttttttttttt

SEQ ID NO: 6111 - DNA, 84 bp, Artificial
  Barcode component
  misc_feature (33)..(34): n is a, c, g, or t
  misc_feature (43)..(44): n is a, c, g, or t
  misc_feature (53)..(54): n is a, c, g, or t
tttttttaagcagtggtatcaacgcagagtacnncttggacanncatatcggnntttttttttttttttttttttttttttttt

SEQ ID NO: 6112 - DNA, 84 bp, Artificial
  Barcode component
  misc_feature (33)..(34): n is a, c, g, or t
  misc_feature (43)..(44): n is a, c, g, or t
  misc_feature (53)..(54): n is a, c, g, or t
tttttttaagcagtggtatcaacgcagagtacnncttggacanncttcggtanntttttttttttttttttttttttttttttt

SEQ ID NO: 6113 - DNA, 84 bp, Artificial
  Barcode component
  misc_feature (33)..(34): n is a, c, g, or t
  misc_feature (43)..(44): n is a, c, g, or t
  misc_feature (53)..(54): n is a, c, g, or t
tttttttaagcagtggtatcaacgcagagtacnncttggacanntcctaacgnntttttttttttttttttttttttttttttt

SEQ ID NO: 6114 - DNA, 84 bp, Artificial
  Barcode component
  misc_feature (33)..(34): n is a, c, g, or t
  misc_feature (43)..(44): n is a, c, g, or t
  misc_feature (53)..(54): n is a, c, g, or t
tttttttaagcagtggtatcaacgcagagtacnncttggacanngtaagccanntttttttttttttttttttttttttttttt

SEQ ID NO: 6115 - DNA, 84 bp, Artificial
  Barcode component
  misc_feature (33)..(34): n is a, c, g, or t
  misc_feature (43)..(44): n is a, c, g, or t
  misc_feature (53)..(54): n is a, c, g, or t
tttttttaagcagtggtatcaacgcagagtacnncttggacanntaaggtggnntttttttttttttttttttttttttttttt

SEQ ID NO: 6116 - DNA, 84 bp, Artificial
  Barcode component
  misc_feature (33)..(34): n is a, c, g, or t
  misc_feature (43)..(44): n is a, c, g, or t
  misc_feature (53)..(54): n is a, c, g, or t
tttttttaagcagtggtatcaacgcagagtacnncttggacannggtaagctnntttttttttttttttttttttttttttttt

SEQ ID NO: 6117 - DNA, 84 bp, Artificial
  Barcode component
  misc_feature (33)..(34): n is a, c, g, or t
  misc_feature (43)..(44): n is a, c, g, or t
  misc_feature (53)..(54): n is a, c, g, or t
tttttttaagcagtggtatcaacgcagagtacnncttggacanntgtgtcganntttttttttttttttttttttttttttttt

SEQ ID NO: 6118 - DNA, 84 bp, Artificial
  Barcode component
  misc_feature (33)..(34): n is a, c, g, or t
  misc_feature (43)..(44): n is a, c, g, or t
  misc_feature (53)..(54): n is a, c, g, or t
tttttttaagcagtggtatcaacgcagagtacnncttggacanngagcatganntttttttttttttttttttttttttttttt

SEQ ID NO: 6119 - DNA, 84 bp, Artificial
  Barcode component
  misc_feature (33)..(34): n is a, c, g, or t
  misc_feature (43)..(44): n is a, c, g, or t
  misc_feature (53)..(54): n is a, c, g, or t
tttttttaagcagtggtatcaacgcagagtacnncttggacanntcgaagtcnntttttttttttttttttttttttttttttt

SEQ ID NO: 6120 - DNA, 84 bp, Artificial
  Barcode component
  misc_feature (33)..(34): n is a, c, g, or t
  misc_feature (43)..(44): n is a, c, g, or t
  misc_feature (53)..(54): n is a, c, g, or t
tttttttaagcagtggtatcaacgcagagtacnncttggacannggtgaacanntttttttttttttttttttttttttttttt

SEQ ID NO: 6121 - DNA, 84 bp, Artificial
  Barcode component
  misc_feature (33)..(34): n is a, c, g, or t
  misc_feature (43)..(44): n is a, c, g, or t
  misc_feature (53)..(54): n is a, c, g, or t
tttttttaagcagtggtatcaacgcagagtacnncttggacannacatgcacnntttttttttttttttttttttttttttttt

SEQ ID NO: 6122 - DNA, 84 bp, Artificial
  Barcode component
  misc_feature (33)..(34): n is a, c, g, or t
  misc_feature (43)..(44): n is a, c, g, or t
  misc_feature (53)..(54): n is a, c, g, or t
tttttttaagcagtggtatcaacgcagagtacnncttggacannccaacagtnntttttttttttttttttttttttttttttt

SEQ ID NO: 6123 - DNA, 84 bp, Artificial
  Barcode component
  misc_feature (33)..(34): n is a, c, g, or t
  misc_feature (43)..(44): n is a, c, g, or t
  misc_feature (53)..(54): n is a, c, g, or t
tttttttaagcagtggtatcaacgcagagtacnncttggacannagaacagcnntttttttttttttttttttttttttttttt

SEQ ID NO: 6124 - DNA, 84 bp, Artificial
  Barcode component
  misc_feature (33)..(34): n is a, c, g, or t
  misc_feature (43)..(44): n is a, c, g, or t
  misc_feature (53)..(54): n is a, c, g, or t
tttttttaagcagtggtatcaacgcagagtacnncttggacanngaacacgtnntttttttttttttttttttttttttttttt

SEQ ID NO: 6125 - DNA, 84 bp, Artificial
  Barcode component
  misc_feature (33)..(34): n is a, c, g, or t
  misc_feature (43)..(44): n is a, c, g, or t
  misc_feature (53)..(54): n is a, c, g, or t
tttttttaagcagtggtatcaacgcagagtacnncttggacannggtcttcanntttttttttttttttttttttttttttttt

SEQ ID NO: 6126 - DNA, 84 bp, Artificial
  Barcode component
  misc_feature (33)..(34): n is a, c, g, or t
  misc_feature (43)..(44): n is a, c, g, or t
  misc_feature (53)..(54): n is a, c, g, or t
tttttttaagcagtggtatcaacgcagagtacnncttggacannaggttcagnntttttttttttttttttttttttttttttt

SEQ ID NO: 6127 - DNA, 84 bp, Artificial
  Barcode component
  misc_feature (33)..(34): n is a, c, g, or t
  misc_feature (43)..(44): n is a, c, g, or t
  misc_feature (53)..(54): n is a, c, g, or t
tttttttaagcagtggtatcaacgcagagtacnncttggacannctagagcanntttttttttttttttttttttttttttttt

SEQ ID NO: 6128 - DNA, 84 bp, Artificial
  Barcode component
  misc_feature (33)..(34): n is a, c, g, or t
  misc_feature (43)..(44): n is a, c, g, or t
  misc_feature (53)..(54): n is a, c, g, or t
tttttttaagcagtggtatcaacgcagagtacnncttggacanncttctagcnntttttttttttttttttttttttttttttt

SEQ ID NO: 6129 - DNA, 84 bp, Artificial
  Barcode component
  misc_feature (33)..(34): n is a, c, g, or t
  misc_feature (43)..(44): n is a, c, g, or t
  misc_feature (53)..(54): n is a, c, g, or t
tttttttaagcagtggtatcaacgcagagtacnncttggacanngagtaacgnntttttttttttttttttttttttttttttt

SEQ ID NO: 6130 - DNA, 84 bp, Artificial
  Barcode component
  misc_feature (33)..(34): n is a, c, g, or t
  misc_feature (43)..(44): n is a, c, g, or t
  misc_feature (53)..(54): n is a, c, g, or t
tttttttaagcagtggtatcaacgcagagtacnncttggacannctaagaggnntttttttttttttttttttttttttttttt

SEQ ID NO: 6131 - DNA, 84 bp, Artificial
  Barcode component
  misc_feature (33)..(34): n is a, c, g, or t
  misc_feature (43)..(44): n is a, c, g, or t
  misc_feature (53)..(54): n is a, c, g, or t
tttttttaagcagtggtatcaacgcagagtacnncttggacannacgtgtagnntttttttttttttttttttttttttttttt

SEQ ID NO: 6132 - DNA, 84 bp, Artificial
  Barcode component
  misc_feature (33)..(34): n is a, c, g, or t
  misc_feature (43)..(44): n is a, c, g, or t
  misc_feature (53)..(54): n is a, c, g, or t
tttttttaagcagtggtatcaacgcagagtacnncttggacannactacaggnntttttttttttttttttttttttttttttt

SEQ ID NO: 6133 - DNA, 84 bp, Artificial
  Barcode component
  misc_feature (33)..(34): n is a, c, g, or t
  misc_feature (43)..(44): n is a, c, g, or t
  misc_feature (53)..(54): n is a, c, g, or t
tttttttaagcagtggtatcaacgcagagtacnncttggacanntacaggtcnntttttttttttttttttttttttttttttt

SEQ ID NO: 6134 - DNA, 84 bp, Artificial
  Barcode component
  misc_feature (33)..(34): n is a, c, g, or t
  misc_feature (43)..(44): n is a, c, g, or t
  misc_feature (53)..(54): n is a, c, g, or t
tttttttaagcagtggtatcaacgcagagtacnncttggacannctcacatgnntttttttttttttttttttttttttttttt

SEQ ID NO: 6135 - DNA, 84 bp, Artificial
  Barcode component
  misc_feature (33)..(34): n is a, c, g, or t
  misc_feature (43)..(44): n is a, c, g, or t
  misc_feature (53)..(54): n is a, c, g, or t
tttttttaagcagtggtatcaacgcagagtacnncttggacannactaggagnntttttttttttttttttttttttttttttt

SEQ ID NO: 6136 - DNA, 84 bp, Artificial
  Barcode component
  misc_feature (33)..(34): n is a, c, g, or t
  misc_feature (43)..(44): n is a, c, g, or t
  misc_feature (53)..(54): n is a, c, g, or t
tttttttaagcagtggtatcaacgcagagtacnncttggacannccatagganntttttttttttttttttttttttttttttt

SEQ ID NO: 6137 - DNA, 84 bp, Artificial
  Barcode component
  misc_feature (33)..(34): n is a, c, g, or t
  misc_feature (43)..(44): n is a, c, g, or t
  misc_feature (53)..(54): n is a, c, g, or t
tttttttaagcagtggtatcaacgcagagtacnncttggacannggagaatcnntttttttttttttttttttttttttttttt

SEQ ID NO: 6138 - DNA, 84 bp, Artificial
  Barcode component
  misc_feature (33)..(34): n is a, c, g, or t
  misc_feature (43)..(44): n is a, c, g, or t
  misc_feature (53)..(54): n is a, c, g, or t
tttttttaagcagtggtatcaacgcagagtacnncttggacanngccaagaanntttttttttttttttttttttttttttttt

SEQ ID NO: 6139 - DNA, 84 bp, Artificial
  Barcode component
  misc_feature (33)..(34): n is a, c, g, or t
  misc_feature (43)..(44): n is a, c, g, or t
  misc_feature (53)..(54): n is a, c, g, or t
tttttttaagcagtggtatcaacgcagagtacnncttggacannaaggcaagnntttttttttttttttttttttttttttttt

SEQ ID NO: 6140 - DNA, 84 bp, Artificial
  Barcode component
  misc_feature (33)..(34): n is a, c, g, or t
  misc_feature (43)..(44): n is a, c, g, or t
  misc_feature (53)..(54): n is a, c, g, or t
tttttttaagcagtggtatcaacgcagagtacnncttggacannaatgtcgcnntttttttttttttttttttttttttttttt

SEQ ID NO: 6141 - DNA, 84 bp, Artificial
  Barcode component
  misc_feature (33)..(34): n is a, c, g, or t
  misc_feature (43)..(44): n is a, c, g, or t
  misc_feature (53)..(54): n is a, c, g, or t
tttttttaagcagtggtatcaacgcagagtacnncttggacannatggaaccnntttttttttttttttttttttttttttttt

SEQ ID NO: 6142 - DNA, 84 bp, Artificial
  Barcode component
  misc_feature (33)..(34): n is a, c, g, or t
  misc_feature (43)..(44): n is a, c, g, or t
  misc_feature (53)..(54): n is a, c, g, or t
tttttttaagcagtggtatcaacgcagagtacnncttggacannagaggcatnntttttttttttttttttttttttttttttt

SEQ ID NO: 6143 - DNA, 84 bp, Artificial
  Barcode component
  misc_feature (33)..(34): n is a, c, g, or t
  misc_feature (43)..(44): n is a, c, g, or t
  misc_feature (53)..(54): n is a, c, g, or t
tttttttaagcagtggtatcaacgcagagtacnncttggacanntgcatagcnntttttttttttttttttttttttttttttt

SEQ ID NO: 6144 - DNA, 84 bp, Artificial
  Barcode component
  misc_feature (33)..(34): n is a, c, g, or t
  misc_feature (43)..(44): n is a, c, g, or t
  misc_feature (53)..(54): n is a, c, g, or t
tttttttaagcagtggtatcaacgcagagtacnncttggacannctaacgganntttttttttttttttttttttttttttttt

SEQ ID NO: 6145 - DNA, 84 bp, Artificial
  Barcode component
  misc_feature (33)..(34): n is a, c, g, or t
  misc_feature (43)..(44): n is a, c, g, or t
  misc_feature (53)..(54): n is a, c, g, or t
tttttttaagcagtggtatcaacgcagagtacnncttggacanntatcgaggnntttttttttttttttttttttttttttttt

SEQ ID NO: 6146 - DNA, 84 bp, Artificial
  Barcode component
  misc_feature (33)..(34): n is a, c, g, or t
  misc_feature (43)..(44): n is a, c, g, or t
  misc_feature (53)..(54): n is a, c, g, or t
tttttttaagcagtggtatcaacgcagagtacnncttggacanncatagcctnntttttttttttttttttttttttttttttt

SEQ ID NO: 6147 - DNA, 84 bp, Artificial
  Barcode component
  misc_feature (33)..(34): n is a, c, g, or t
  misc_feature (43)..(44): n is a, c, g, or t
  misc_feature (53)..(54): n is a, c, g, or t
tttttttaagcagtggtatcaacgcagagtacnncttggacannatcgagacnntttttttttttttttttttttttttttttt

SEQ ID NO: 6148 - DNA, 84 bp, Artificial
  Barcode component
  misc_feature (33)..(34): n is a, c, g, or t
  misc_feature (43)..(44): n is a, c, g, or t
  misc_feature (53)..(54): n is a, c, g, or t
tttttttaagcagtggtatcaacgcagagtacnncttggacannggaagagtnntttttttttttttttttttttttttttttt

SEQ ID NO: 6149 - DNA, 84 bp, Artificial
  Barcode component
  misc_feature (33)..(34): n is a, c, g, or t
  misc_feature (43)..(44): n is a, c, g, or t
  misc_feature (53)..(54): n is a, c, g, or t
tttttttaagcagtggtatcaacgcagagtacnncttggacannccaagtagnntttttttttttttttttttttttttttttt

SEQ ID NO: 6150 - DNA, 84 bp, Artificial
  Barcode component
  misc_feature (33)..(34): n is a, c, g, or t
  misc_feature (43)..(44): n is a, c, g, or t
  misc_feature (53)..(54): n is a, c, g, or t
tttttttaagcagtggtatcaacgcagagtacnncttggacannctgaacagnntttttttttttttttttttttttttttttt

SEQ ID NO: 6151 - DNA, 84 bp, Artificial
  Barcode component
  misc_feature (33)..(34): n is a, c, g, or t
  misc_feature (43)..(44): n is a, c, g, or t
  misc_feature (53)..(54): n is a, c, g, or t
tttttttaagcagtggtatcaacgcagagtacnncttggacanngtaggttcnntttttttttttttttttttttttttttttt

SEQ ID NO: 6152 - DNA, 84 bp, Artificial
  Barcode component
  misc_feature (33)..(34): n is a, c, g, or t
  misc_feature (43)..(44): n is a, c, g, or t
  misc_feature (53)..(54): n is a, c, g, or t
tttttttaagcagtggtatcaacgcagagtacnncttggacanngtatggacnntttttttttttttttttttttttttttttt

SEQ ID NO: 6153 - DNA, 84 bp, Artificial
  Barcode component
  misc_feature (33)..(34): n is a, c, g, or t
  misc_feature (43)..(44): n is a, c, g, or t
  misc_feature (53)..(54): n is a, c, g, or t
tttttttaagcagtggtatcaacgcagagtacnncttggacanntcgcaacanntttttttttttttttttttttttttttttt

SEQ ID NO: 6154 - DNA, 84 bp, Artificial
  Barcode component
  misc_feature (33)..(34): n is a, c, g, or t
  misc_feature (43)..(44): n is a, c, g, or t
  misc_feature (53)..(54): n is a, c, g, or t
tttttttaagcagtggtatcaacgcagagtacnncttggacannccgctaatnntttttttttttttttttttttttttttttt

SEQ ID NO: 6155 - DNA, 84 bp, Artificial
  Barcode component
  misc_feature (33)..(34): n is a, c, g, or t
  misc_feature (43)..(44): n is a, c, g, or t
  misc_feature (53)..(54): n is a, c, g, or t
tttttttaagcagtggtatcaacgcagagtacnncttggacanngattcgcanntttttttttttttttttttttttttttttt

SEQ ID NO: 6156 - DNA, 84 bp, Artificial
  Barcode component
  misc_feature (33)..(34): n is a, c, g, or t
  misc_feature (43)..(44): n is a, c, g, or t
  misc_feature (53)..(54): n is a, c, g, or t
tttttttaagcagtggtatcaacgcagagtacnncttggacanncgatggaanntttttttttttttttttttttttttttttt

SEQ ID NO: 6157 - DNA, 84 bp, Artificial
  Barcode component
  misc_feature (33)..(34): n is a, c, g, or t
  misc_feature (43)..(44): n is a, c, g, or t
  misc_feature (53)..(54): n is a, c, g, or t
tttttttaagcagtggtatcaacgcagagtacnncttggacannagcaagganntttttttttttttttttttttttttttttt

SEQ ID NO: 6158 - DNA, 84 bp, Artificial
  Barcode component
  misc_feature (33)..(34): n is a, c, g, or t
  misc_feature (43)..(44): n is a, c, g, or t
  misc_feature (53)..(54): n is a, c, g, or t
tttttttaagcagtggtatcaacgcagagtacnncttggacanncgtagcaanntttttttttttttttttttttttttttttt

SEQ ID NO: 6159 - DNA, 84 bp, Artificial
  Barcode component
  misc_feature (33)..(34): n is a, c, g, or t
  misc_feature (43)..(44): n is a, c, g, or t
  misc_feature (53)..(54): n is a, c, g, or t
tttttttaagcagtggtatcaacgcagagtacnncttggacanntggcagtanntttttttttttttttttttttttttttttt

SEQ ID NO: 6160 - DNA, 84 bp, Artificial
  Barcode component
  misc_feature (33)..(34): n is a, c, g, or t
  misc_feature (43)..(44): n is a, c, g, or t
  misc_feature (53)..(54): n is a, c, g, or t
tttttttaagcagtggtatcaacgcagagtacnncttggacanncggtagttnntttttttttttttttttttttttttttttt

SEQ ID NO: 6161 - DNA, 84 bp, Artificial
  Barcode component
  misc_feature (33)..(34): n is a, c, g, or t
  misc_feature (43)..(44): n is a, c, g, or t
  misc_feature (53)..(54): n is a, c, g, or t
tttttttaagcagtggtatcaacgcagagtacnncttggacanntgacttcgnntttttttttttttttttttttttttttttt

SEQ ID NO: 6162 - DNA, 84 bp, Artificial
  Barcode component
  misc_feature (33)..(34): n is a, c, g, or t
  misc_feature (43)..(44): n is a, c, g, or t
  misc_feature (53)..(54): n is a, c, g, or t
tttttttaagcagtggtatcaacgcagagtacnncttggacanngagtgcaanntttttttttttttttttttttttttttttt

SEQ ID NO: 6163 - DNA, 84 bp, Artificial
  Barcode component
  misc_feature (33)..(34): n is a, c, g, or t
  misc_feature (43)..(44): n is a, c, g, or t
  misc_feature (53)..(54): n is a, c, g, or t
tttttttaagcagtggtatcaacgcagagtacnncttggacannacggtaacnntttttttttttttttttttttttttttttt

SEQ ID NO: 6164 - DNA, 84 bp, Artificial
  Barcode component
  misc_feature (33)..(34): n is a, c, g, or t
  misc_feature (43)..(44): n is a, c, g, or t
  misc_feature (53)..(54): n is a, c, g, or t
tttttttaagcagtggtatcaacgcagagtacnncttggacannaagtggtgnntttttttttttttttttttttttttttttt

SEQ ID NO: 6165 - DNA, 84 bp, Artificial
  Barcode component
  misc_feature (33)..(34): n is a, c, g, or t
  misc_feature (43)..(44): n is a, c, g, or t
  misc_feature (53)..(54): n is a, c, g, or t
tttttttaagcagtggtatcaacgcagagtacnncttggacannggagacaanntttttttttttttttttttttttttttttt

SEQ ID NO: 6166 - DNA, 84 bp, Artificial
  Barcode component
  misc_feature (33)..(34): n is a, c, g, or t
  misc_feature (43)..(44): n is a, c, g, or t
  misc_feature (53)..(54): n is a, c, g, or t
tttttttaagcagtggtatcaacgcagagtacnncttggacanntcaaggacnntttttttttttttttttttttttttttttt

SEQ ID NO: 6167 - DNA, 84 bp, Artificial
  Barcode component
  misc_feature (33)..(34): n is a, c, g, or t
  misc_feature (43)..(44): n is a, c, g, or t
  misc_feature (53)..(54): n is a, c, g, or t
tttttttaagcagtggtatcaacgcagagtacnncttggacannaagagagcnntttttttttttttttttttttttttttttt

SEQ ID NO: 6168 - DNA, 84 bp, Artificial
  Barcode component
  misc_feature (33)..(34): n is a, c, g, or t
  misc_feature (43)..(44): n is a, c, g, or t
  misc_feature (53)..(54): n is a, c, g, or t
tttttttaagcagtggtatcaacgcagagtacnncttggacanncgagagatnntttttttttttttttttttttttttttttt

SEQ ID NO: 6169 - DNA, 84 bp, Artificial
  Barcode component
  misc_feature (33)..(34): n is a, c, g, or t
  misc_feature (43)..(44): n is a, c, g, or t
  misc_feature (53)..(54): n is a, c, g, or t
tttttttaagcagtggtatcaacgcagagtacnncttggacannacagatggnntttttttttttttttttttttttttttttt

SEQ ID NO: 6170 - DNA, 84 bp, Artificial
  Barcode component
  misc_feature (33)..(34): n is a, c, g, or t
  misc_feature (43)..(44): n is a, c, g, or t
  misc_feature (53)..(54): n is a, c, g, or t
tttttttaagcagtggtatcaacgcagagtacnncttggacannaggagtcanntttttttttttttttttttttttttttttt

SEQ ID NO: 6171 - DNA, 84 bp, Artificial
  Barcode component
  misc_feature (33)..(34): n is a, c, g, or t
  misc_feature (43)..(44): n is a, c, g, or t
  misc_feature (53)..(54): n is a, c, g, or t
tttttttaagcagtggtatcaacgcagagtacnncttggacanncgtgttacnntttttttttttttttttttttttttttttt

SEQ ID NO: 6172 - DNA, 84 bp, Artificial
  Barcode component
  misc_feature (33)..(34): n is a, c, g, or t
  misc_feature (43)..(44): n is a, c, g, or t
  misc_feature (53)..(54): n is a, c, g, or t
tttttttaagcagtggtatcaacgcagagtacnncttggacanntagtgtgcnntttttttttttttttttttttttttttttt

SEQ ID NO: 6173 - DNA, 84 bp, Artificial
  Barcode component
  misc_feature (33)..(34): n is a, c, g, or t
  misc_feature (43)..(44): n is a, c, g, or t
  misc_feature (53)..(54): n is a, c, g, or t
tttttttaagcagtggtatcaacgcagagtacnncttggacannctcatgacnntttttttttttttttttttttttttttttt

SEQ ID NO: 6174 - DNA, 84 bp, Artificial
  Barcode component
  misc_feature (33)..(34): n is a, c, g, or t
  misc_feature (43)..(44): n is a, c, g, or t
  misc_feature (53)..(54): n is a, c, g, or t
tttttttaagcagtggtatcaacgcagagtacnncttggacanngtatccagnntttttttttttttttttttttttttttttt

SEQ ID NO: 6175 - DNA, 84 bp, Artificial
  Barcode component
  misc_feature (33)..(34): n is a, c, g, or t
  misc_feature (43)..(44): n is a, c, g, or t
  misc_feature (53)..(54): n is a, c, g, or t
tttttttaagcagtggtatcaacgcagagtacnncttggacannacgcctatnntttttttttttttttttttttttttttttt

SEQ ID NO: 6176 - DNA, 84 bp, Artificial
  Barcode component
  misc_feature (33)..(34): n is a, c, g, or t
  misc_feature (43)..(44): n is a, c, g, or t
  misc_feature (53)..(54): n is a, c, g, or t
tttttttaagcagtggtatcaacgcagagtacnncttggacannaacgacctnntttttttttttttttttttttttttttttt

SEQ ID NO: 6177 - DNA, 84 bp, Artificial
  Barcode component
  misc_feature (33)..(34): n is a, c, g, or t
  misc_feature (43)..(44): n is a, c, g, or t
  misc_feature (53)..(54): n is a, c, g, or t
tttttttaagcagtggtatcaacgcagagtacnncttggacannatcaggctnntttttttttttttttttttttttttttttt

SEQ ID NO: 6178 - DNA, 84 bp, Artificial
  Barcode component
  misc_feature (33)..(34): n is a, c, g, or t
  misc_feature (43)..(44): n is a, c, g, or t
  misc_feature (53)..(54): n is a, c, g, or t
tttttttaagcagtggtatcaacgcagagtacnncttggacanncaagttcgnntttttttttttttttttttttttttttttt

SEQ ID NO: 6179 - DNA, 84 bp, Artificial
  Barcode component
  misc_feature (33)..(34): n is a, c, g, or t
  misc_feature (43)..(44): n is a, c, g, or t
  misc_feature (53)..(54): n is a, c, g, or t
tttttttaagcagtggtatcaacgcagagtacnncttggacanntagccaganntttttttttttttttttttttttttttttt

SEQ ID NO: 6180 - DNA, 84 bp, Artificial
  Barcode component
  misc_feature (33)..(34): n is a, c, g, or t
  misc_feature (43)..(44): n is a, c, g, or t
  misc_feature (53)..(54): n is a, c, g, or t
tttttttaagcagtggtatcaacgcagagtacnncttggacanncaatcacgnntttttttttttttttttttttttttttttt

SEQ ID NO: 6181 - DNA, 84 bp, Artificial
  Barcode component
  misc_feature (33)..(34): n is a, c, g, or t
  misc_feature (43)..(44): n is a, c, g, or t
  misc_feature (53)..(54): n is a, c, g, or t
tttttttaagcagtggtatcaacgcagagtacnncttggacanngcaacaagnntttttttttttttttttttttttttttttt

SEQ ID NO: 6182 - DNA, 84 bp, Artificial
  Barcode component
  misc_feature (33)..(34): n is a, c, g, or t
  misc_feature (43)..(44): n is a, c, g, or t
  misc_feature (53)..(54): n is a, c, g, or t
tttttttaagcagtggtatcaacgcagagtacnncttggacanncacgacaanntttttttttttttttttttttttttttttt

SEQ ID NO: 6183 - DNA, 84 bp, Artificial
  Barcode component
  misc_feature (33)..(34): n is a, c, g, or t
  misc_feature (43)..(44): n is a, c, g, or t
  misc_feature (53)..(54): n is a, c, g, or t
tttttttaagcagtggtatcaacgcagagtacnncttggacanntacggaganntttttttttttttttttttttttttttttt

SEQ ID NO: 6184 - DNA, 84 bp, Artificial
  Barcode component
  misc_feature (33)..(34): n is a, c, g, or t
  misc_feature (43)..(44): n is a, c, g, or t
  misc_feature (53)..(54): n is a, c, g, or t
tttttttaagcagtggtatcaacgcagagtacnncttggacanncgacaaganntttttttttttttttttttttttttttttt

SEQ ID NO: 6185 - DNA, 84 bp, Artificial
  Barcode component
  misc_feature (33)..(34): n is a, c, g, or t
  misc_feature (43)..(44): n is a, c, g, or t
  misc_feature (53)..(54): n is a, c, g, or t
tttttttaagcagtggtatcaacgcagagtacnncttggacanncgaagtganntttttttttttttttttttttttttttttt

SEQ ID NO: 6186 - DNA, 84 bp, Artificial
  Barcode component
  misc_feature (33)..(34): n is a, c, g, or t
  misc_feature (43)..(44): n is a, c, g, or t
  misc_feature (53)..(54): n is a, c, g, or t
tttttttaagcagtggtatcaacgcagagtacnncttggacannagctggtanntttttttttttttttttttttttttttttt

SEQ ID NO: 6187 - DNA, 84 bp, Artificial
  Barcode component
  misc_feature (33)..(34): n is a, c, g, or t
  misc_feature (43)..(44): n is a, c, g, or t
  misc_feature (53)..(54): n is a, c, g, or t
tttttttaagcagtggtatcaacgcagagtacnncttggacannaactaggcnntttttttttttttttttttttttttttttt

SEQ ID NO: 6188 - DNA, 84 bp, Artificial
  Barcode component
  misc_feature (33)..(34): n is a, c, g, or t
  misc_feature (43)..(44): n is a, c, g, or t
  misc_feature (53)..(54): n is a, c, g, or t
tttttttaagcagtggtatcaacgcagagtacnncttggacanncagcaagtnntttttttttttttttttttttttttttttt

SEQ ID NO: 6189 - DNA, 84 bp, Artificial
  Barcode component
  misc_feature (33)..(34): n is a, c, g, or t
  misc_feature (43)..(44): n is a, c, g, or t
  misc_feature (53)..(54): n is a, c, g, or t
tttttttaagcagtggtatcaacgcagagtacnncttggacannacgaggtanntttttttttttttttttttttttttttttt

SEQ ID NO: 6190 - DNA, 84 bp, Artificial
  Barcode component
  misc_feature (33)..(34): n is a, c, g, or t
  misc_feature (43)..(44): n is a, c, g, or t
  misc_feature (53)..(54): n is a, c, g, or t
tttttttaagcagtggtatcaacgcagagtacnncttggacanncatcttccnntttttttttttttttttttttttttttttt

SEQ ID NO: 6191 - DNA, 84 bp, Artificial
  Barcode component
  misc_feature (33)..(34): n is a, c, g, or t
  misc_feature (43)..(44): n is a, c, g, or t
  misc_feature (53)..(54): n is a, c, g, or t
tttttttaagcagtggtatcaacgcagagtacnncttggacanncctgaatcnntttttttttttttttttttttttttttttt

SEQ ID NO: 6192 - DNA, 84 bp, Artificial
  Barcode component
  misc_feature (33)..(34): n is a, c, g, or t
  misc_feature (43)..(44): n is a, c, g, or t
  misc_feature (53)..(54): n is a, c, g, or t
tttttttaagcagtggtatcaacgcagagtacnncttggacanntgcagactnntttttttttttttttttttttttttttttt

SEQ ID NO: 6193 - DNA, 84 bp, Artificial
  Barcode component
  misc_feature (33)..(34): n is a, c, g, or t
  misc_feature (43)..(44): n is a, c, g, or t
  misc_feature (53)..(54): n is a, c, g, or t
tttttttaagcagtggtatcaacgcagagtacnncttggacannagatgtggnntttttttttttttttttttttttttttttt

SEQ ID NO: 6194 - DNA, 84 bp, Artificial
  Barcode component
  misc_feature (33)..(34): n is a, c, g, or t
  misc_feature (43)..(44): n is a, c, g, or t
  misc_feature (53)..(54): n is a, c, g, or t
tttttttaagcagtggtatcaacgcagagtacnncttggacannagttcgacnntttttttttttttttttttttttttttttt

SEQ ID NO: 6195 - DNA, 84 bp, Artificial
  Barcode component
  misc_feature (33)..(34): n is a, c, g, or t
  misc_feature (43)..(44): n is a, c, g, or t
  misc_feature (53)..(54): n is a, c, g, or t
tttttttaagcagtggtatcaacgcagagtacnncttggacannacaacctcnntttttttttttttttttttttttttttttt

SEQ ID NO: 6196 - DNA, 84 bp, Artificial
  Barcode component
  misc_feature (33)..(34): n is a, c, g, or t
  misc_feature (43)..(44): n is a, c, g, or t
  misc_feature (53)..(54): n is a, c, g, or t
tttttttaagcagtggtatcaacgcagagtacnncttggacanncatggtagnntttttttttttttttttttttttttttttt

SEQ ID NO: 6197 - DNA, 84 bp, Artificial
  Barcode component
  misc_feature (33)..(34): n is a, c, g, or t
  misc_feature (43)..(44): n is a, c, g, or t
  misc_feature (53)..(54): n is a, c, g, or t
tttttttaagcagtggtatcaacgcagagtacnncttggacanncgtatctcnntttttttttttttttttttttttttttttt

SEQ ID NO: 6198 - DNA, 84 bp, Artificial
  Barcode component
  misc_feature (33)..(34): n is a, c, g, or t
  misc_feature (43)..(44): n is a, c, g, or t
  misc_feature (53)..(54): n is a, c, g, or t
tttttttaagcagtggtatcaacgcagagtacnncttggacanncctagttcnntttttttttttttttttttttttttttttt

SEQ ID NO: 6199 - DNA, 84 bp, Artificial
  Barcode component
  misc_feature (33)..(34): n is a, c, g, or t
  misc_feature (43)..(44): n is a, c, g, or t
  misc_feature (53)..(54): n is a, c, g, or t
tttttttaagcagtggtatcaacgcagagtacnncttggacanncaagagtcnntttttttttttttttttttttttttttttt

SEQ ID NO: 6200 - DNA, 84 bp, Artificial
  Barcode component
  misc_feature (33)..(34): n is a, c, g, or t
  misc_feature (43)..(44): n is a, c, g, or t
  misc_feature (53)..(54): n is a, c, g, or t
tttttttaagcagtggtatcaacgcagagtacnntggtcaagnnaatcggcanntttttttttttttttttttttttttttttt

SEQ ID NO: 6201 - DNA, 84 bp, Artificial
  Barcode component
  misc_feature (33)..(34): n is a, c, g, or t
  misc_feature (43)..(44): n is a, c, g, or t
  misc_feature (53)..(54): n is a, c, g, or t
tttttttaagcagtggtatcaacgcagagtacnntggtcaagnntacggcatnntttttttttttttttttttttttttttttt

SEQ ID NO: 6202 - DNA, 84 bp, Artificial
  Barcode component
  misc_feature (33)..(34): n is a, c, g, or t
  misc_feature (43)..(44): n is a, c, g, or t
  misc_feature (53)..(54): n is a, c, g, or t
tttttttaagcagtggtatcaacgcagagtacnntggtcaagnnttggatcgnntttttttttttttttttttttttttttttt

SEQ ID NO: 6203 - DNA, 84 bp, Artificial
  Barcode component
  misc_feature (33)..(34): n is a, c, g, or t
  misc_feature (43)..(44): n is a, c, g, or t
  misc_feature (53)..(54): n is a, c, g, or t
tttttttaagcagtggtatcaacgcagagtacnntggtcaagnntggaacganntttttttttttttttttttttttttttttt

SEQ ID NO: 6204 - DNA, 84 bp, Artificial
  Barcode component
  misc_feature (33)..(34): n is a, c, g, or t
  misc_feature (43)..(44): n is a, c, g, or t
  misc_feature (53)..(54): n is a, c, g, or t
tttttttaagcagtggtatcaacgcagagtacnntggtcaagnnggcaatcanntttttttttttttttttttttttttttttt

SEQ ID NO: 6205 - DNA, 84 bp, Artificial
  Barcode component
  misc_feature (33)..(34): n is a, c, g, or t
  misc_feature (43)..(44): n is a, c, g, or t
  misc_feature (53)..(54): n is a, c, g, or t
tttttttaagcagtggtatcaacgcagagtacnntggtcaagnngaatccganntttttttttttttttttttttttttttttt

SEQ ID NO: 6206 - DNA, 84 bp, Artificial
  Barcode component
  misc_feature (33)..(34): n is a, c, g, or t
  misc_feature (43)..(44): n is a, c, g, or t
  misc_feature (53)..(54): n is a, c, g, or t
tttttttaagcagtggtatcaacgcagagtacnntggtcaagnnttacggtgnntttttttttttttttttttttttttttttt

SEQ ID NO: 6207 - DNA, 84 bp, Artificial
  Barcode component
  misc_feature (33)..(34): n is a, c, g, or t
  misc_feature (43)..(44): n is a, c, g, or t
  misc_feature (53)..(54): n is a, c, g, or t
tttttttaagcagtggtatcaacgcagagtacnntggtcaagnncatatcggnntttttttttttttttttttttttttttttt

SEQ ID NO: 6208 - DNA, 84 bp, Artificial
  Barcode component
  misc_feature (33)..(34): n is a, c, g, or t
  misc_feature (43)..(44): n is a, c, g, or t
  misc_feature (53)..(54): n is a, c, g, or t
tttttttaagcagtggtatcaacgcagagtacnntggtcaagnncttcggtanntttttttttttttttttttttttttttttt

SEQ ID NO: 6209 - DNA, 84 bp, Artificial
  Barcode component
  misc_feature (33)..(34): n is a, c, g, or t
  misc_feature (43)..(44): n is a, c, g, or t
  misc_feature (53)..(54): n is a, c, g, or t
tttttttaagcagtggtatcaacgcagagtacnntggtcaagnntcctaacgnntttttttttttttttttttttttttttttt

SEQ ID NO: 6210 - DNA, 84 bp, Artificial
  Barcode component
  misc_feature (33)..(34): n is a, c, g, or t
  misc_feature (43)..(44): n is a, c, g, or t
  misc_feature (53)..(54): n is a, c, g, or t
tttttttaagcagtggtatcaacgcagagtacnntggtcaagnngtaagccanntttttttttttttttttttttttttttttt

SEQ ID NO: 6211 - DNA, 84 bp, Artificial
  Barcode component
  misc_feature (33)..(34): n is a, c, g, or t
  misc_feature (43)..(44): n is a, c, g, or t
  misc_feature (53)..(54): n is a, c, g, or t
tttttttaagcagtggtatcaacgcagagtacnntggtcaagnntaaggtggnntttttttttttttttttttttttttttttt

SEQ ID NO: 6212 - DNA, 84 bp, Artificial
  Barcode component
  misc_feature (33)..(34): n is a, c, g, or t
  misc_feature (43)..(44): n is a, c, g, or t
  misc_feature (53)..(54): n is a, c, g, or t
tttttttaagcagtggtatcaacgcagagtacnntggtcaagnnggtaagctnntttttttttttttttttttttttttttttt

SEQ ID NO: 6213 - DNA, 84 bp, Artificial
  Barcode component
  misc_feature (33)..(34): n is a, c, g, or t
  misc_feature (43)..(44): n is a, c, g, or t
  misc_feature (53)..(54): n is a, c, g, or t
tttttttaagcagtggtatcaacgcagagtacnntggtcaagnntgtgtcganntttttttttttttttttttttttttttttt

SEQ ID NO: 6214 - DNA, 84 bp, Artificial
  Barcode component
  misc_feature (33)..(34): n is a, c, g, or t
  misc_feature (43)..(44): n is a, c, g, or t
  misc_feature (53)..(54): n is a, c, g, or t
tttttttaagcagtggtatcaacgcagagtacnntggtcaagnngagcatganntttttttttttttttttttttttttttttt

SEQ ID NO: 6215 - DNA, 84 bp, Artificial
  Barcode component
  misc_feature (33)..(34): n is a, c, g, or t
  misc_feature (43)..(44): n is a, c, g, or t
  misc_feature (53)..(54): n is a, c, g, or t
tttttttaagcagtggtatcaacgcagagtacnntggtcaagnntcgaagtcnntttttttttttttttttttttttttttttt

SEQ ID NO: 6216 - DNA, 84 bp, Artificial
  Barcode component
  misc_feature (33)..(34): n is a, c, g, or t
  misc_feature (43)..(44): n is a, c, g, or t
  misc_feature (53)..(54): n is a, c, g, or t
tttttttaagcagtggtatcaacgcagagtacnntggtcaagnnggtgaacanntttttttttttttttttttttttttttttt

SEQ ID NO: 6217 - DNA, 84 bp, Artificial
  Barcode component
  misc_feature (33)..(34): n is a, c, g, or t
  misc_feature (43)..(44): n is a, c, g, or t
  misc_feature (53)..(54): n is a, c, g, or t
tttttttaagcagtggtatcaacgcagagtacnntggtcaagnnacatgcacnntttttttttttttttttttttttttttttt

SEQ ID NO: 6218 - DNA, 84 bp, Artificial
  Barcode component
  misc_feature (33)..(34): n is a, c, g, or t
  misc_feature (43)..(44): n is a, c, g, or t
  misc_feature (53)..(54): n is a, c, g, or t
tttttttaagcagtggtatcaacgcagagtacnntggtcaagnnccaacagtnntttttttttttttttttttttttttttttt

SEQ ID NO: 6219 - DNA, 84 bp, Artificial
  Barcode component
  misc_feature (33)..(34): n is a, c, g, or t
  misc_feature (43)..(44): n is a, c, g, or t
  misc_feature (53)..(54): n is a, c, g, or t
tttttttaagcagtggtatcaacgcagagtacnntggtcaagnnagaacagcnntttttttttttttttttttttttttttttt

SEQ ID NO: 6220 - DNA, 84 bp, Artificial
  Barcode component
  misc_feature (33)..(34): n is a, c, g, or t
  misc_feature (43)..(44): n is a, c, g, or t
  misc_feature (53)..(54): n is a, c, g, or t
tttttttaagcagtggtatcaacgcagagtacnntggtcaagnngaacacgtnntttttttttttttttttttttttttttttt

SEQ ID NO: 6221 - DNA, 84 bp, Artificial
  Barcode component
  misc_feature (33)..(34): n is a, c, g, or t
  misc_feature (43)..(44): n is a, c, g, or t
  misc_feature (53)..(54): n is a, c, g, or t
tttttttaagcagtggtatcaacgcagagtacnntggtcaagnnggtcttcanntttttttttttttttttttttttttttttt

SEQ ID NO: 6222 - DNA, 84 bp, Artificial
  Barcode component
  misc_feature (33)..(34): n is a, c, g, or t
  misc_feature (43)..(44): n is a, c, g, or t
  misc_feature (53)..(54): n is a, c, g, or t
tttttttaagcagtggtatcaacgcagagtacnntggtcaagnnaggttcagnntttttttttttttttttttttttttttttt

SEQ ID NO: 6223 - DNA, 84 bp, Artificial
  Barcode component
  misc_feature (33)..(34): n is a, c, g, or t
  misc_feature (43)..(44): n is a, c, g, or t
  misc_feature (53)..(54): n is a, c, g, or t
tttttttaagcagtggtatcaacgcagagtacnntggtcaagnnctagagcanntttttttttttttttttttttttttttttt

SEQ ID NO: 6224 - DNA, 84 bp, Artificial
  Barcode component
  misc_feature (33)..(34): n is a, c, g, or t
  misc_feature (43)..(44): n is a, c, g, or t
  misc_feature (53)..(54): n is a, c, g, or t
tttttttaagcagtggtatcaacgcagagtacnntggtcaagnncttctagcnntttttttttttttttttttttttttttttt

SEQ ID NO: 6225 - DNA, 84 bp, Artificial
  Barcode component
  misc_feature (33)..(34): n is a, c, g, or t
  misc_feature (43)..(44): n is a, c, g, or t
  misc_feature (53)..(54): n is a, c, g, or t
tttttttaagcagtggtatcaacgcagagtacnntggtcaagnngagtaacgnntttttttttttttttttttttttttttttt

SEQ ID NO: 6226 - DNA, 84 bp, Artificial
  Barcode component
  misc_feature (33)..(34): n is a, c, g, or t
  misc_feature (43)..(44): n is a, c, g, or t
  misc_feature (53)..(54): n is a, c, g, or t
tttttttaagcagtggtatcaacgcagagtacnntggtcaagnnctaagaggnntttttttttttttttttttttttttttttt

SEQ ID NO: 6227 - DNA, 84 bp, Artificial
  Barcode component
  misc_feature (33)..(34): n is a, c, g, or t
  misc_feature (43)..(44): n is a, c, g, or t
  misc_feature (53)..(54): n is a, c, g, or t
tttttttaagcagtggtatcaacgcagagtacnntggtcaagnnacgtgtagnntttttttttttttttttttttttttttttt

SEQ ID NO: 6228 - DNA, 84 bp, Artificial
  Barcode component
  misc_feature (33)..(34): n is a, c, g, or t
  misc_feature (43)..(44): n is a, c, g, or t
  misc_feature (53)..(54): n is a, c, g, or t
tttttttaagcagtggtatcaacgcagagtacnntggtcaagnnactacaggnntttttttttttttttttttttttttttttt

SEQ ID NO: 6229 - DNA, 84 bp, Artificial
  Barcode component
  misc_feature (33)..(34): n is a, c, g, or t
  misc_feature (43)..(44): n is a, c, g, or t
  misc_feature (53)..(54): n is a, c, g, or t
tttttttaagcagtggtatcaacgcagagtacnntggtcaagnntacaggtcnntttttttttttttttttttttttttttttt

SEQ ID NO: 6230 - DNA, 84 bp, Artificial
  Barcode component
  misc_feature (33)..(34): n is a, c, g, or t
  misc_feature (43)..(44): n is a, c, g, or t
  misc_feature (53)..(54): n is a, c, g, or t
tttttttaagcagtggtatcaacgcagagtacnntggtcaagnnctcacatgnntttttttttttttttttttttttttttttt

SEQ ID NO: 6231 - DNA, 84 bp, Artificial
  Barcode component
  misc_feature (33)..(34): n is a, c, g, or t
  misc_feature (43)..(44): n is a, c, g, or t
  misc_feature (53)..(54): n is a, c, g, or t
tttttttaagcagtggtatcaacgcagagtacnntggtcaagnnactaggagnntttttttttttttttttttttttttttttt

SEQ ID NO: 6232 - DNA, 84 bp, Artificial
  Barcode component
  misc_feature (33)..(34): n is a, c, g, or t
  misc_feature (43)..(44): n is a, c, g, or t
  misc_feature (53)..(54): n is a, c, g, or t
tttttttaagcagtggtatcaacgcagagtacnntggtcaagnnccatagganntttttttttttttttttttttttttttttt

SEQ ID NO: 6233 - DNA, 84 bp, Artificial
  Barcode component
  misc_feature (33)..(34): n is a, c, g, or t
  misc_feature (43)..(44): n is a, c, g, or t
  misc_feature (53)..(54): n is a, c, g, or t
tttttttaagcagtggtatcaacgcagagtacnntggtcaagnnggagaatcnntttttttttttttttttttttttttttttt

SEQ ID NO: 6234 - DNA, 84 bp, Artificial
  Barcode component
  misc_feature (33)..(34): n is a, c, g, or t
  misc_feature (43)..(44): n is a, c, g, or t
  misc_feature (53)..(54): n is a, c, g, or t
tttttttaagcagtggtatcaacgcagagtacnntggtcaagnngccaagaanntttttttttttttttttttttttttttttt

SEQ ID NO: 6235 - DNA, 84 bp, Artificial
  Barcode component
  misc_feature (33)..(34): n is a, c, g, or t
  misc_feature (43)..(44): n is a, c, g, or t
  misc_feature (53)..(54): n is a, c, g, or t
tttttttaagcagtggtatcaacgcagagtacnntggtcaagnnaaggcaagnntttttttttttttttttttttttttttttt

SEQ ID NO: 6236 - DNA, 84 bp, Artificial
  Barcode component
  misc_feature (33)..(34): n is a, c, g, or t
  misc_feature (43)..(44): n is a, c, g, or t
  misc_feature (53)..(54): n is a, c, g, or t
tttttttaagcagtggtatcaacgcagagtacnntggtcaagnnaatgtcgcnntttttttttttttttttttttttttttttt

SEQ ID NO: 6237 - DNA, 84 bp, Artificial
  Barcode component
  misc_feature (33)..(34): n is a, c, g, or t
  misc_feature (43)..(44): n is a, c, g, or t
  misc_feature (53)..(54): n is a, c, g, or t
tttttttaagcagtggtatcaacgcagagtacnntggtcaagnnatggaaccnntttttttttttttttttttttttttttttt

SEQ ID NO: 6238 - DNA, 84 bp, Artificial
  Barcode component
  misc_feature (33)..(34): n is a, c, g, or t
  misc_feature (43)..(44): n is a, c, g, or t
  misc_feature (53)..(54): n is a, c, g, or t
tttttttaagcagtggtatcaacgcagagtacnntggtcaagnnagaggcatnntttttttttttttttttttttttttttttt

SEQ ID NO: 6239 - DNA, 84 bp, Artificial
  Barcode component
  misc_feature (33)..(34): n is a, c, g, or t
  misc_feature (43)..(44): n is a, c, g, or t
  misc_feature (53)..(54): n is a, c, g, or t
tttttttaagcagtggtatcaacgcagagtacnntggtcaagnntgcatagcnntttttttttttttttttttttttttttttt

SEQ ID NO: 6240 - DNA, 84 bp, Artificial
  Barcode component
  misc_feature (33)..(34): n is a, c, g, or t
  misc_feature (43)..(44): n is a, c, g, or t
  misc_feature (53)..(54): n is a, c, g, or t
tttttttaagcagtggtatcaacgcagagtacnntggtcaagnnctaacgganntttttttttttttttttttttttttttttt

SEQ ID NO: 6241 - DNA, 84 bp, Artificial
  Barcode component
  misc_feature (33)..(34): n is a, c, g, or t
  misc_feature (43)..(44): n is a, c, g, or t
  misc_feature (53)..(54): n is a, c, g, or t
tttttttaagcagtggtatcaacgcagagtacnntggtcaagnntatcgaggnntttttttttttttttttttttttttttttt

SEQ ID NO: 6242 - DNA, 84 bp, Artificial
  Barcode component
  misc_feature (33)..(34): n is a, c, g, or t
  misc_feature (43)..(44): n is a, c, g, or t
  misc_feature (53)..(54): n is a, c, g, or t
tttttttaagcagtggtatcaacgcagagtacnntggtcaagnncatagcctnntttttttttttttttttttttttttttttt

SEQ ID NO: 6243 - DNA, 84 bp, Artificial
  Barcode component
  misc_feature (33)..(34): n is a, c, g, or t
  misc_feature (43)..(44): n is a, c, g, or t
  misc_feature (53)..(54): n is a, c, g, or t
tttttttaagcagtggtatcaacgcagagtacnntggtcaagnnatcgagacnntttttttttttttttttttttttttttttt

SEQ ID NO: 6244 - DNA, 84 bp, Artificial
  Barcode component
  misc_feature (33)..(34): n is a, c, g, or t
  misc_feature (43)..(44): n is a, c, g, or t
  misc_feature (53)..(54): n is a, c, g, or t
tttttttaagcagtggtatcaacgcagagtacnntggtcaagnnggaagagtnntttttttttttttttttttttttttttttt

SEQ ID NO: 6245 - DNA, 84 bp, Artificial
  Barcode component
  misc_feature (33)..(34): n is a, c, g, or t
  misc_feature (43)..(44): n is a, c, g, or t
  misc_feature (53)..(54): n is a, c, g, or t
tttttttaagcagtggtatcaacgcagagtacnntggtcaagnnccaagtagnntttttttttttttttttttttttttttttt

SEQ ID NO: 6246 - DNA, 84 bp, Artificial
  Barcode component
  misc_feature (33)..(34): n is a, c, g, or t
  misc_feature (43)..(44): n is a, c, g, or t
  misc_feature (53)..(54): n is a, c, g, or t
tttttttaagcagtggtatcaacgcagagtacnntggtcaagnnctgaacagnntttttttttttttttttttttttttttttt

SEQ ID NO: 6247 - DNA, 84 bp, Artificial
  Barcode component
  misc_feature (33)..(34): n is a, c, g, or t
  misc_feature (43)..(44): n is a, c, g, or t
  misc_feature (53)..(54): n is a, c, g, or t
tttttttaagcagtggtatcaacgcagagtacnntggtcaagnngtaggttcnntttttttttttttttttttttttttttttt

SEQ ID NO: 6248 - DNA, 84 bp, Artificial
  Barcode component
  misc_feature (33)..(34): n is a, c, g, or t
  misc_feature (43)..(44): n is a, c, g, or t
  misc_feature (53)..(54): n is a, c, g, or t
tttttttaagcagtggtatcaacgcagagtacnntggtcaagnngtatggacnntttttttttttttttttttttttttttttt

SEQ ID NO: 6249 - DNA, 84 bp, Artificial
  Barcode component
  misc_feature (33)..(34): n is a, c, g, or t
  misc_feature (43)..(44): n is a, c, g, or t
  misc_feature (53)..(54): n is a, c, g, or t
tttttttaagcagtggtatcaacgcagagtacnntggtcaagnntcgcaacanntttttttttttttttttttttttttttttt

SEQ ID NO: 6250 - DNA, 84 bp, Artificial
  Barcode component
  misc_feature (33)..(34): n is a, c, g, or t
  misc_feature (43)..(44): n is a, c, g, or t
  misc_feature (53)..(54): n is a, c, g, or t
tttttttaagcagtggtatcaacgcagagtacnntggtcaagnnccgctaatnntttttttttttttttttttttttttttttt

SEQ ID NO: 6251 - DNA, 84 bp, Artificial
  Barcode component
  misc_feature (33)..(34): n is a, c, g, or t
  misc_feature (43)..(44): n is a, c, g, or t
  misc_feature (53)..(54): n is a, c, g, or t
tttttttaagcagtggtatcaacgcagagtacnntggtcaagnngattcgcanntttttttttttttttttttttttttttttt

SEQ ID NO: 6252 - DNA, 84 bp, Artificial
  Barcode component
  misc_feature (33)..(34): n is a, c, g, or t
  misc_feature (43)..(44): n is a, c, g, or t
  misc_feature (53)..(54): n is a, c, g, or t
tttttttaagcagtggtatcaacgcagagtacnntggtcaagnncgatggaanntttttttttttttttttttttttttttttt

SEQ ID NO: 6253 - DNA, 84 bp, Artificial
  Barcode component
  misc_feature (33)..(34): n is a, c, g, or t
  misc_feature (43)..(44): n is a, c, g, or t
  misc_feature (53)..(54): n is a, c, g, or t
tttttttaagcagtggtatcaacgcagagtacnntggtcaagnnagcaagganntttttttttttttttttttttttttttttt

SEQ ID NO: 6254 - DNA, 84 bp, Artificial
  Barcode component
  misc_feature (33)..(34): n is a, c, g, or t
  misc_feature (43)..(44): n is a, c, g, or t
  misc_feature (53)..(54): n is a, c, g, or t
tttttttaagcagtggtatcaacgcagagtacnntggtcaagnncgtagcaanntttttttttttttttttttttttttttttt

SEQ ID NO: 6255 - DNA, 84 bp, Artificial
  Barcode component
  misc_feature (33)..(34): n is a, c, g, or t
  misc_feature (43)..(44): n is a, c, g, or t
  misc_feature (53)..(54): n is a, c, g, or t
tttttttaagcagtggtatcaacgcagagtacnntggtcaagnntggcagtanntttttttttttttttttttttttttttttt

SEQ ID NO: 6256 - DNA, 84 bp, Artificial
  Barcode component
  misc_feature (33)..(34): n is a, c, g, or t
  misc_feature (43)..(44): n is a, c, g, or t
  misc_feature (53)..(54): n is a, c, g, or t
tttttttaagcagtggtatcaacgcagagtacnntggtcaagnncggtagttnntttttttttttttttttttttttttttttt

SEQ ID NO: 6257 - DNA, 84 bp, Artificial
  Barcode component
  misc_feature (33)..(34): n is a, c, g, or t
  misc_feature (43)..(44): n is a, c, g, or t
  misc_feature (53)..(54): n is a, c, g, or t
tttttttaagcagtggtatcaacgcagagtacnntggtcaagnntgacttcgnntttttttttttttttttttttttttttttt

SEQ ID NO: 6258 - DNA, 84 bp, Artificial
  Barcode component
  misc_feature (33)..(34): n is a, c, g, or t
  misc_feature (43)..(44): n is a, c, g, or t
  misc_feature (53)..(54): n is a, c, g, or t
tttttttaagcagtggtatcaacgcagagtacnntggtcaagnngagtgcaanntttttttttttttttttttttttttttttt

SEQ ID NO: 6259 - DNA, 84 bp, Artificial
  Barcode component
  misc_feature (33)..(34): n is a, c, g, or t
  misc_feature (43)..(44): n is a, c, g, or t
  misc_feature (53)..(54): n is a, c, g, or t
tttttttaagcagtggtatcaacgcagagtacnntggtcaagnnacggtaacnntttttttttttttttttttttttttttttt

SEQ ID NO: 6260 - DNA, 84 bp, Artificial
  Barcode component
  misc_feature (33)..(34): n is a, c, g, or t
  misc_feature (43)..(44): n is a, c, g, or t
  misc_feature (53)..(54): n is a, c, g, or t
tttttttaagcagtggtatcaacgcagagtacnntggtcaagnnaagtggtgnntttttttttttttttttttttttttttttt

SEQ ID NO: 6261 - DNA, 84 bp, Artificial
  Barcode component
  misc_feature (33)..(34): n is a, c, g, or t
  misc_feature (43)..(44): n is a, c, g, or t
  misc_feature (53)..(54): n is a, c, g, or t
tttttttaagcagtggtatcaacgcagagtacnntggtcaagnnggagacaanntttttttttttttttttttttttttttttt

SEQ ID NO: 6262 - DNA, 84 bp, Artificial
  Barcode component
  misc_feature (33)..(34): n is a, c, g, or t
  misc_feature (43)..(44): n is a, c, g, or t
  misc_feature (53)..(54): n is a, c, g, or t
tttttttaagcagtggtatcaacgcagagtacnntggtcaagnntcaaggacnntttttttttttttttttttttttttttttt

SEQ ID NO: 6263 - DNA, 84 bp, Artificial
  Barcode component
  misc_feature (33)..(34): n is a, c, g, or t
  misc_feature (43)..(44): n is a, c, g, or t
  misc_feature (53)..(54): n is a, c, g, or t
tttttttaagcagtggtatcaacgcagagtacnntggtcaagnnaagagagcnntttttttttttttttttttttttttttttt

SEQ ID NO: 6264 - DNA, 84 bp, Artificial
  Barcode component
  misc_feature (33)..(34): n is a, c, g, or t
  misc_feature (43)..(44): n is a, c, g, or t
  misc_feature (53)..(54): n is a, c, g, or t
tttttttaagcagtggtatcaacgcagagtacnntggtcaagnncgagagatnntttttttttttttttttttttttttttttt

SEQ ID NO: 6265 - DNA, 84 bp, Artificial
  Barcode component
  misc_feature (33)..(34): n is a, c, g, or t
  misc_feature (43)..(44): n is a, c, g, or t
  misc_feature (53)..(54): n is a, c, g, or t
tttttttaagcagtggtatcaacgcagagtacnntggtcaagnnacagatggnntttttttttttttttttttttttttttttt

SEQ ID NO: 6266 - DNA, 84 bp, Artificial
  Barcode component
  misc_feature (33)..(34): n is a, c, g, or t
  misc_feature (43)..(44): n is a, c, g, or t
  misc_feature (53)..(54): n is a, c, g, or t
tttttttaagcagtggtatcaacgcagagtacnntggtcaagnnaggagtcanntttttttttttttttttttttttttttttt

SEQ ID NO: 6267 - DNA, 84 bp, Artificial
  Barcode component
  misc_feature (33)..(34): n is a, c, g, or t
  misc_feature (43)..(44): n is a, c, g, or t
  misc_feature (53)..(54): n is a, c, g, or t
tttttttaagcagtggtatcaacgcagagtacnntggtcaagnncgtgttacnntttttttttttttttttttttttttttttt

SEQ ID NO: 6268 - DNA, 84 bp, Artificial
  Barcode component
  misc_feature (33)..(34): n is a, c, g, or t
  misc_feature (43)..(44): n is a, c, g, or t
  misc_feature (53)..(54): n is a, c, g, or t
tttttttaagcagtggtatcaacgcagagtacnntggtcaagnntagtgtgcnntttttttttttttttttttttttttttttt

SEQ ID NO: 6269 - DNA, 84 bp, Artificial
  Barcode component
  misc_feature (33)..(34): n is a, c, g, or t
  misc_feature (43)..(44): n is a, c, g, or t
  misc_feature (53)..(54): n is a, c, g, or t
tttttttaagcagtggtatcaacgcagagtacnntggtcaagnnctcatgacnntttttttttttttttttttttttttttttt

SEQ ID NO: 6270 - DNA, 84 bp, Artificial
  Barcode component
  misc_feature (33)..(34): n is a, c, g, or t
  misc_feature (43)..(44): n is a, c, g, or t
  misc_feature (53)..(54): n is a, c, g, or t
tttttttaagcagtggtatcaacgcagagtacnntggtcaagnngtatccagnntttttttttttttttttttttttttttttt

SEQ ID NO: 6271 - DNA, 84 bp, Artificial
  Barcode component
  misc_feature (33)..(34): n is a, c, g, or t
  misc_feature (43)..(44): n is a, c, g, or t
  misc_feature (53)..(54): n is a, c, g, or t
tttttttaagcagtggtatcaacgcagagtacnntggtcaagnnacgcctatnntttttttttttttttttttttttttttttt

SEQ ID NO: 6272 - DNA, 84 bp, Artificial
  Barcode component
  misc_feature (33)..(34): n is a, c, g, or t
  misc_feature (43)..(44): n is a, c, g, or t
  misc_feature (53)..(54): n is a, c, g, or t
tttttttaagcagtggtatcaacgcagagtacnntggtcaagnnaacgacctnntttttttttttttttttttttttttttttt

SEQ ID NO: 6273 - DNA, 84 bp, Artificial
  Barcode component
  misc_feature (33)..(34): n is a, c, g, or t
  misc_feature (43)..(44): n is a, c, g, or t
  misc_feature (53)..(54): n is a, c, g, or t
tttttttaagcagtggtatcaacgcagagtacnntggtcaagnnatcaggctnntttttttttttttttttttttttttttttt

SEQ ID NO: 6274 - DNA, 84 bp, Artificial
  Barcode component
  misc_feature (33)..(34): n is a, c, g, or t
  misc_feature (43)..(44): n is a, c, g, or t
  misc_feature (53)..(54): n is a, c, g, or t
tttttttaagcagtggtatcaacgcagagtacnntggtcaagnncaagttcgnntttttttttttttttttttttttttttttt

SEQ ID NO: 6275 - DNA, 84 bp, Artificial
  Barcode component
  misc_feature (33)..(34): n is a, c, g, or t
  misc_feature (43)..(44): n is a, c, g, or t
  misc_feature (53)..(54): n is a, c, g, or t
tttttttaagcagtggtatcaacgcagagtacnntggtcaagnntagccaganntttttttttttttttttttttttttttttt

SEQ ID NO: 6276 - DNA, 84 bp, Artificial
  Barcode component
  misc_feature (33)..(34): n is a, c, g, or t
  misc_feature (43)..(44): n is a, c, g, or t
  misc_feature (53)..(54): n is a, c, g, or t
tttttttaagcagtggtatcaacgcagagtacnntggtcaagnncaatcacgnntttttttttttttttttttttttttttttt

SEQ ID NO: 6277 - DNA, 84 bp, Artificial
  Barcode component
  misc_feature (33)..(34): n is a, c, g, or t
  misc_feature (43)..(44): n is a, c, g, or t
  misc_feature (53)..(54): n is a, c, g, or t
tttttttaagcagtggtatcaacgcagagtacnntggtcaagnngcaacaagnntttttttttttttttttttttttttttttt

SEQ ID NO: 6278 - DNA, 84 bp, Artificial
  Barcode component
  misc_feature (33)..(34): n is a, c, g, or t
  misc_feature (43)..(44): n is a, c, g, or t
  misc_feature (53)..(54): n is a, c, g, or t
tttttttaagcagtggtatcaacgcagagtacnntggtcaagnncacgacaanntttttttttttttttttttttttttttttt

SEQ ID NO: 6279 - DNA, 84 bp, Artificial
  Barcode component
  misc_feature (33)..(34): n is a, c, g, or t
  misc_feature (43)..(44): n is a, c, g, or t
  misc_feature (53)..(54): n is a, c, g, or t
tttttttaagcagtggtatcaacgcagagtacnntggtcaagnntacggaganntttttttttttttttttttttttttttttt

SEQ ID NO: 6280 - DNA, 84 bp, Artificial
  Barcode component
  misc_feature (33)..(34): n is a, c, g, or t
  misc_feature (43)..(44): n is a, c, g, or t
  misc_feature (53)..(54): n is a, c, g, or t
tttttttaagcagtggtatcaacgcagagtacnntggtcaagnncgacaaganntttttttttttttttttttttttttttttt

SEQ ID NO: 6281 - DNA, 84 bp, Artificial
  Barcode component
  misc_feature (33)..(34): n is a, c, g, or t
  misc_feature (43)..(44): n is a, c, g, or t
  misc_feature (53)..(54): n is a, c, g, or t
tttttttaagcagtggtatcaacgcagagtacnntggtcaagnncgaagtganntttttttttttttttttttttttttttttt

SEQ ID NO: 6282 - DNA, 84 bp, Artificial
  Barcode component
  misc_feature (33)..(34): n is a, c, g, or t
  misc_feature (43)..(44): n is a, c, g, or t
  misc_feature (53)..(54): n is a, c, g, or t
tttttttaagcagtggtatcaacgcagagtacnntggtcaagnnagctggtanntttttttttttttttttttttttttttttt

SEQ ID NO: 6283 - DNA, 84 bp, Artificial
  Barcode component
  misc_feature (33)..(34): n is a, c, g, or t
  misc_feature (43)..(44): n is a, c, g, or t
  misc_feature (53)..(54): n is a, c, g, or t
tttttttaagcagtggtatcaacgcagagtacnntggtcaagnnaactaggcnntttttttttttttttttttttttttttttt

SEQ ID NO: 6284 - DNA, 84 bp, Artificial
  Barcode component
  misc_feature (33)..(34): n is a, c, g, or t
  misc_feature (43)..(44): n is a, c, g, or t
  misc_feature (53)..(54): n is a, c, g, or t
tttttttaagcagtggtatcaacgcagagtacnntggtcaagnncagcaagtnntttttttttttttttttttttttttttttt

SEQ ID NO: 6285 - DNA, 84 bp, Artificial
  Barcode component
  misc_feature (33)..(34): n is a, c, g, or t
  misc_feature (43)..(44): n is a, c, g, or t
  misc_feature (53)..(54): n is a, c, g, or t
tttttttaagcagtggtatcaacgcagagtacnntggtcaagnnacgaggtanntttttttttttttttttttttttttttttt

SEQ ID NO: 6286 - DNA, 84 bp, Artificial
  Barcode component
  misc_feature (33)..(34): n is a, c, g, or t
  misc_feature (43)..(44): n is a, c, g, or t
  misc_feature (53)..(54): n is a, c, g, or t
tttttttaagcagtggtatcaacgcagagtacnntggtcaagnncatcttccnntttttttttttttttttttttttttttttt

SEQ ID NO: 6287 - DNA, 84 bp, Artificial
  Barcode component
  misc_feature (33)..(34): n is a, c, g, or t
  misc_feature (43)..(44): n is a, c, g, or t
  misc_feature (53)..(54): n is a, c, g, or t
tttttttaagcagtggtatcaacgcagagtacnntggtcaagnncctgaatcnntttttttttttttttttttttttttttttt

SEQ ID NO: 6288 - DNA, 84 bp, Artificial
  Barcode component
  misc_feature (33)..(34): n is a, c, g, or t
  misc_feature (43)..(44): n is a, c, g, or t
  misc_feature (53)..(54): n is a, c, g, or t
tttttttaagcagtggtatcaacgcagagtacnntggtcaagnntgcagactnntttttttttttttttttttttttttttttt

SEQ ID NO: 6289 - DNA, 84 bp, Artificial
  Barcode component
  misc_feature (33)..(34): n is a, c, g, or t
  misc_feature (43)..(44): n is a, c, g, or t
  misc_feature (53)..(54): n is a, c, g, or t
tttttttaagcagtggtatcaacgcagagtacnntggtcaagnnagatgtggnntttttttttttttttttttttttttttttt

SEQ ID NO: 6290 - DNA, 84 bp, Artificial
  Barcode component
  misc_feature (33)..(34): n is a, c, g, or t
  misc_feature (43)..(44): n is a, c, g, or t
  misc_feature (53)..(54): n is a, c, g, or t
tttttttaagcagtggtatcaacgcagagtacnntggtcaagnnagttcgacnntttttttttttttttttttttttttttttt

SEQ ID NO: 6291 - DNA, 84 bp, Artificial
  Barcode component
  misc_feature (33)..(34): n is a, c, g, or t
  misc_feature (43)..(44): n is a, c, g, or t
  misc_feature (53)..(54): n is a, c, g, or t
tttttttaagcagtggtatcaacgcagagtacnntggtcaagnnacaacctcnntttttttttttttttttttttttttttttt

SEQ ID NO: 6292 - DNA, 84 bp, Artificial
  Barcode component
  misc_feature (33)..(34): n is a, c, g, or t
  misc_feature (43)..(44): n is a, c, g, or t
  misc_feature (53)..(54): n is a, c, g, or t
tttttttaagcagtggtatcaacgcagagtacnntggtcaagnncatggtagnntttttttttttttttttttttttttttttt

SEQ ID NO: 6293 - DNA, 84 bp, Artificial
  Barcode component
  misc_feature (33)..(34): n is a, c, g, or t
  misc_feature (43)..(44): n is a, c, g, or t
  misc_feature (53)..(54): n is a, c, g, or t
tttttttaagcagtggtatcaacgcagagtacnntggtcaagnncgtatctcnntttttttttttttttttttttttttttttt

SEQ ID NO: 6294 - DNA, 84 bp, Artificial
  Barcode component
  misc_feature (33)..(34): n is a, c, g, or t
  misc_feature (43)..(44): n is a, c, g, or t
  misc_feature (53)..(54): n is a, c, g, or t
tttttttaagcagtggtatcaacgcagagtacnntggtcaagnncctagttcnntttttttttttttttttttttttttttttt

SEQ ID NO: 6295 - DNA, 84 bp, Artificial
  Barcode component
  misc_feature (33)..(34): n is a, c, g, or t
  misc_feature (43)..(44): n is a, c, g, or t
  misc_feature (53)..(54): n is a, c, g, or t
tttttttaagcagtggtatcaacgcagagtacnntggtcaagnncaagagtcnntttttttttttttttttttttttttttttt

SEQ ID NO: 6296 - DNA, 84 bp, Artificial
  Barcode component
  misc_feature (33)..(34): n is a, c, g, or t
  misc_feature (43)..(44): n is a, c, g, or t
  misc_feature (53)..(54): n is a, c, g, or t
tttttttaagcagtggtatcaacgcagagtacnngaatgagcnnaatcggcanntttttttttttttttttttttttttttttt

SEQ ID NO: 6297 - DNA, 84 bp, Artificial
  Barcode component
  misc_feature (33)..(34): n is a, c, g, or t
  misc_feature (43)..(44): n is a, c, g, or t
  misc_feature (53)..(54): n is a, c, g, or t
tttttttaagcagtggtatcaacgcagagtacnngaatgagcnntacggcatnntttttttttttttttttttttttttttttt

SEQ ID NO: 6298 - DNA, 84 bp, Artificial
  Barcode component
  misc_feature (33)..(34): n is a, c, g, or t
  misc_feature (43)..(44): n is a, c, g, or t
  misc_feature (53)..(54): n is a, c, g, or t
tttttttaagcagtggtatcaacgcagagtacnngaatgagcnnttggatcgnntttttttttttttttttttttttttttttt

SEQ ID NO: 6299 - DNA, 84 bp, Artificial
  Barcode component
  misc_feature (33)..(34): n is a, c, g, or t
  misc_feature (43)..(44): n is a, c, g, or t
  misc_feature (53)..(54): n is a, c, g, or t
tttttttaagcagtggtatcaacgcagagtacnngaatgagcnntggaacganntttttttttttttttttttttttttttttt

SEQ ID NO: 6300 - DNA, 84 bp, Artificial
  Barcode component
  misc_feature (33)..(34): n is a, c, g, or t
  misc_feature (43)..(44): n is a, c, g, or t
  misc_feature (53)..(54): n is a, c, g, or t
tttttttaagcagtggtatcaacgcagagtacnngaatgagcnnggcaatcanntttttttttttttttttttttttttttttt

SEQ ID NO: 6301 - DNA, 84 bp, Artificial
  Barcode component
  misc_feature (33)..(34): n is a, c, g, or t
  misc_feature (43)..(44): n is a, c, g, or t
  misc_feature (53)..(54): n is a, c, g, or t
tttttttaagcagtggtatcaacgcagagtacnngaatgagcnngaatccganntttttttttttttttttttttttttttttt

SEQ ID NO: 6302 - DNA, 84 bp, Artificial
  Barcode component
  misc_feature (33)..(34): n is a, c, g, or t
  misc_feature (43)..(44): n is a, c, g, or t
  misc_feature (53)..(54): n is a, c, g, or t
tttttttaagcagtggtatcaacgcagagtacnngaatgagcnnttacggtgnntttttttttttttttttttttttttttttt

SEQ ID NO: 6303 - DNA, 84 bp, Artificial
  Barcode component
  misc_feature (33)..(34): n is a, c, g, or t
  misc_feature (43)..(44): n is a, c, g, or t
  misc_feature (53)..(54): n is a, c, g, or t
tttttttaagcagtggtatcaacgcagagtacnngaatgagcnncatatcggnntttttttttttttttttttttttttttttt

SEQ ID NO: 6304 - DNA, 84 bp, Artificial
  Barcode component
  misc_feature (33)..(34): n is a, c, g, or t
  misc_feature (43)..(44): n is a, c, g, or t
  misc_feature (53)..(54): n is a, c, g, or t
tttttttaagcagtggtatcaacgcagagtacnngaatgagcnncttcggtanntttttttttttttttttttttttttttttt

SEQ ID NO: 6305 - DNA, 84 bp, Artificial
  Barcode component
  misc_feature (33)..(34): n is a, c, g, or t
  misc_feature (43)..(44): n is a, c, g, or t
  misc_feature (53)..(54): n is a, c, g, or t
tttttttaagcagtggtatcaacgcagagtacnngaatgagcnntcctaacgnntttttttttttttttttttttttttttttt

SEQ ID NO: 6306 - DNA, 84 bp, Artificial
  Barcode component
  misc_feature (33)..(34): n is a, c, g, or t
  misc_feature (43)..(44): n is a, c, g, or t
  misc_feature (53)..(54): n is a, c, g, or t
tttttttaagcagtggtatcaacgcagagtacnngaatgagcnngtaagccanntttttttttttttttttttttttttttttt

SEQ ID NO: 6307 - DNA, 84 bp, Artificial
  Barcode component
  misc_feature (33)..(34): n is a, c, g, or t
  misc_feature (43)..(44): n is a, c, g, or t
  misc_feature (53)..(54): n is a, c, g, or t
tttttttaagcagtggtatcaacgcagagtacnngaatgagcnntaaggtggnntttttttttttttttttttttttttttttt

SEQ ID NO: 6308 - DNA, 84 bp, Artificial
  Barcode component
  misc_feature (33)..(34): n is a, c, g, or t
  misc_feature (43)..(44): n is a, c, g, or t
  misc_feature (53)..(54): n is a, c, g, or t
tttttttaagcagtggtatcaacgcagagtacnngaatgagcnnggtaagctnntttttttttttttttttttttttttttttt

SEQ ID NO: 6309 - DNA, 84 bp, Artificial
  Barcode component
  misc_feature (33)..(34): n is a, c, g, or t
  misc_feature (43)..(44): n is a, c, g, or t
  misc_feature (53)..(54): n is a, c, g, or t
tttttttaagcagtggtatcaacgcagagtacnngaatgagcnntgtgtcganntttttttttttttttttttttttttttttt

SEQ ID NO: 6310 - DNA, 84 bp, Artificial
  Barcode component
  misc_feature (33)..(34): n is a, c, g, or t
  misc_feature (43)..(44): n is a, c, g, or t
  misc_feature (53)..(54): n is a, c, g, or t
tttttttaagcagtggtatcaacgcagagtacnngaatgagcnngagcatganntttttttttttttttttttttttttttttt

SEQ ID NO: 6311 - DNA, 84 bp, Artificial
  Barcode component
  misc_feature (33)..(34): n is a, c, g, or t
  misc_feature (43)..(44): n is a, c, g, or t
  misc_feature (53)..(54): n is a, c, g, or t
tttttttaagcagtggtatcaacgcagagtacnngaatgagcnntcgaagtcnntttttttttttttttttttttttttttttt

SEQ ID NO: 6312 - DNA, 84 bp, Artificial
  Barcode component
  misc_feature (33)..(34): n is a, c, g, or t
  misc_feature (43)..(44): n is a, c, g, or t
  misc_feature (53)..(54): n is a, c, g, or t
tttttttaagcagtggtatcaacgcagagtacnngaatgagcnnggtgaacanntttttttttttttttttttttttttttttt

SEQ ID NO: 6313 - DNA, 84 bp, Artificial
  Barcode component
  misc_feature (33)..(34): n is a, c, g, or t
  misc_feature (43)..(44): n is a, c, g, or t
  misc_feature (53)..(54): n is a, c, g, or t
tttttttaagcagtggtatcaacgcagagtacnngaatgagcnnacatgcacnntttttttttttttttttttttttttttttt

SEQ ID NO: 6314 - DNA, 84 bp, Artificial
  Barcode component
  misc_feature (33)..(34): n is a, c, g, or t
  misc_feature (43)..(44): n is a, c, g, or t
  misc_feature (53)..(54): n is a, c, g, or t
tttttttaagcagtggtatcaacgcagagtacnngaatgagcnnccaacagtnntttttttttttttttttttttttttttttt

SEQ ID NO: 6315 - DNA, 84 bp, Artificial
  Barcode component
  misc_feature (33)..(34): n is a, c, g, or t
  misc_feature (43)..(44): n is a, c, g, or t
  misc_feature (53)..(54): n is a, c, g, or t
tttttttaagcagtggtatcaacgcagagtacnngaatgagcnnagaacagcnntttttttttttttttttttttttttttttt

SEQ ID NO: 6316 - DNA, 84 bp, Artificial
  Barcode component
  misc_feature (33)..(34): n is a, c, g, or t
  misc_feature (43)..(44): n is a, c, g, or t
  misc_feature (53)..(54): n is a, c, g, or t
tttttttaagcagtggtatcaacgcagagtacnngaatgagcnngaacacgtnntttttttttttttttttttttttttttttt

SEQ ID NO: 6317 - DNA, 84 bp, Artificial
  Barcode component
  misc_feature (33)..(34): n is a, c, g, or t
  misc_feature (43)..(44): n is a, c, g, or t
  misc_feature (53)..(54): n is a, c, g, or t
tttttttaagcagtggtatcaacgcagagtacnngaatgagcnnggtcttcanntttttttttttttttttttttttttttttt

SEQ ID NO: 6318 - DNA, 84 bp, Artificial
  Barcode component
  misc_feature (33)..(34): n is a, c, g, or t
  misc_feature (43)..(44): n is a, c, g, or t
  misc_feature (53)..(54): n is a, c, g, or t
tttttttaagcagtggtatcaacgcagagtacnngaatgagcnnaggttcagnntttttttttttttttttttttttttttttt

SEQ ID NO: 6319 - DNA, 84 bp, Artificial
  Barcode component
  misc_feature (33)..(34): n is a, c, g, or t
  misc_feature (43)..(44): n is a, c, g, or t
  misc_feature (53)..(54): n is a, c, g, or t
tttttttaagcagtggtatcaacgcagagtacnngaatgagcnnctagagcanntttttttttttttttttttttttttttttt

SEQ ID NO: 6320 - DNA, 84 bp, Artificial
  Barcode component
  misc_feature (33)..(34): n is a, c, g, or t
  misc_feature (43)..(44): n is a, c, g, or t
  misc_feature (53)..(54): n is a, c, g, or t
tttttttaagcagtggtatcaacgcagagtacnngaatgagcnncttctagcnntttttttttttttttttttttttttttttt

SEQ ID NO: 6321 - DNA, 84 bp, Artificial
  Barcode component
  misc_feature (33)..(34): n is a, c, g, or t
  misc_feature (43)..(44): n is a, c, g, or t
  misc_feature (53)..(54): n is a, c, g, or t
tttttttaagcagtggtatcaacgcagagtacnngaatgagcnngagtaacgnntttttttttttttttttttttttttttttt

SEQ ID NO: 6322 - DNA, 84 bp, Artificial
  Barcode component
  misc_feature (33)..(34): n is a, c, g, or t
  misc_feature (43)..(44): n is a, c, g, or t
  misc_feature (53)..(54): n is a, c, g, or t
tttttttaagcagtggtatcaacgcagagtacnngaatgagcnnctaagaggnntttttttttttttttttttttttttttttt

SEQ ID NO: 6323 - DNA, 84 bp, Artificial
  Barcode component
  misc_feature (33)..(34): n is a, c, g, or t
  misc_feature (43)..(44): n is a, c, g, or t
  misc_feature (53)..(54): n is a, c, g, or t
tttttttaagcagtggtatcaacgcagagtacnngaatgagcnnacgtgtagnntttttttttttttttttttttttttttttt

SEQ ID NO: 6324 - DNA, 84 bp, Artificial
  Barcode component
  misc_feature (33)..(34): n is a, c, g, or t
  misc_feature (43)..(44): n is a, c, g, or t
  misc_feature (53)..(54): n is a, c, g, or t
tttttttaagcagtggtatcaacgcagagtacnngaatgagcnnactacaggnntttttttttttttttttttttttttttttt

SEQ ID NO: 6325 - DNA, 84 bp, Artificial
  Barcode component
  misc_feature (33)..(34): n is a, c, g, or t
  misc_feature (43)..(44): n is a, c, g, or t
  misc_feature (53)..(54): n is a, c, g, or t
tttttttaagcagtggtatcaacgcagagtacnngaatgagcnntacaggtcnntttttttttttttttttttttttttttttt

SEQ ID NO: 6326 - DNA, 84 bp, Artificial
  Barcode component
  misc_feature (33)..(34): n is a, c, g, or t
  misc_feature (43)..(44): n is a, c, g, or t
  misc_feature (53)..(54): n is a, c, g, or t
tttttttaagcagtggtatcaacgcagagtacnngaatgagcnnctcacatgnntttttttttttttttttttttttttttttt

SEQ ID NO: 6327 - DNA, 84 bp, Artificial
  Barcode component
  misc_feature (33)..(34): n is a, c, g, or t
  misc_feature (43)..(44): n is a, c, g, or t
  misc_feature (53)..(54): n is a, c, g, or t
tttttttaagcagtggtatcaacgcagagtacnngaatgagcnnactaggagnntttttttttttttttttttttttttttttt

SEQ ID NO: 6328 - DNA, 84 bp, Artificial
  Barcode component
  misc_feature (33)..(34): n is a, c, g, or t
  misc_feature (43)..(44): n is a, c, g, or t
  misc_feature (53)..(54): n is a, c, g, or t
tttttttaagcagtggtatcaacgcagagtacnngaatgagcnnccatagganntttttttttttttttttttttttttttttt

SEQ ID NO: 6329 - DNA, 84 bp, Artificial
  Barcode component
  misc_feature (33)..(34): n is a, c, g, or t
  misc_feature (43)..(44): n is a, c, g, or t
  misc_feature (53)..(54): n is a, c, g, or t
tttttttaagcagtggtatcaacgcagagtacnngaatgagcnnggagaatcnntttttttttttttttttttttttttttttt

SEQ ID NO: 6330 - DNA, 84 bp, Artificial
  Barcode component
  misc_feature (33)..(34): n is a, c, g, or t
  misc_feature (43)..(44): n is a, c, g, or t
  misc_feature (53)..(54): n is a, c, g, or t
tttttttaagcagtggtatcaacgcagagtacnngaatgagcnngccaagaanntttttttttttttttttttttttttttttt

SEQ ID NO: 6331 - DNA, 84 bp, Artificial
  Barcode component
  misc_feature (33)..(34): n is a, c, g, or t
  misc_feature (43)..(44): n is a, c, g, or t
  misc_feature (53)..(54): n is a, c, g, or t
tttttttaagcagtggtatcaacgcagagtacnngaatgagcnnaaggcaagnntttttttttttttttttttttttttttttt

SEQ ID NO: 6332 - DNA, 84 bp, Artificial
  Barcode component
  misc_feature (33)..(34): n is a, c, g, or t
  misc_feature (43)..(44): n is a, c, g, or t
  misc_feature (53)..(54): n is a, c, g, or t
tttttttaagcagtggtatcaacgcagagtacnngaatgagcnnaatgtcgcnntttttttttttttttttttttttttttttt

SEQ ID NO: 6333 - DNA, 84 bp, Artificial
  Barcode component
  misc_feature (33)..(34): n is a, c, g, or t
  misc_feature (43)..(44): n is a, c, g, or t
  misc_feature (53)..(54): n is a, c, g, or t
tttttttaagcagtggtatcaacgcagagtacnngaatgagcnnatggaaccnntttttttttttttttttttttttttttttt

SEQ ID NO: 6334 - DNA, 84 bp, Artificial
  Barcode component
  misc_feature (33)..(34): n is a, c, g, or t
  misc_feature (43)..(44): n is a, c, g, or t
  misc_feature (53)..(54): n is a, c, g, or t
tttttttaagcagtggtatcaacgcagagtacnngaatgagcnnagaggcatnntttttttttttttttttttttttttttttt

SEQ ID NO: 6335 - DNA, 84 bp, Artificial
  Barcode component
  misc_feature (33)..(34): n is a, c, g, or t
  misc_feature (43)..(44): n is a, c, g, or t
  misc_feature (53)..(54): n is a, c, g, or t
tttttttaagcagtggtatcaacgcagagtacnngaatgagcnntgcatagcnntttttttttttttttttttttttttttttt

SEQ ID NO: 6336 - DNA, 84 bp, Artificial
  Barcode component
  misc_feature (33)..(34): n is a, c, g, or t
  misc_feature (43)..(44): n is a, c, g, or t
  misc_feature (53)..(54): n is a, c, g, or t
tttttttaagcagtggtatcaacgcagagtacnngaatgagcnnctaacgganntttttttttttttttttttttttttttttt

SEQ ID NO: 6337 - DNA, 84 bp, Artificial
  Barcode component
  misc_feature (33)..(34): n is a, c, g, or t
  misc_feature (43)..(44): n is a, c, g, or t
  misc_feature (53)..(54): n is a, c, g, or t
tttttttaagcagtggtatcaacgcagagtacnngaatgagcnntatcgaggnntttttttttttttttttttttttttttttt

SEQ ID NO: 6338 - DNA, 84 bp, Artificial
  Barcode component
  misc_feature (33)..(34): n is a, c, g, or t
  misc_feature (43)..(44): n is a, c, g, or t
  misc_feature (53)..(54): n is a, c, g, or t
tttttttaagcagtggtatcaacgcagagtacnngaatgagcnncatagcctnntttttttttttttttttttttttttttttt

SEQ ID NO: 6339 - DNA, 84 bp, Artificial
  Barcode component
  misc_feature (33)..(34): n is a, c, g, or t
  misc_feature (43)..(44): n is a, c, g, or t
  misc_feature (53)..(54): n is a, c, g, or t
tttttttaagcagtggtatcaacgcagagtacnngaatgagcnnatcgagacnntttttttttttttttttttttttttttttt

SEQ ID NO: 6340 - DNA, 84 bp, Artificial
  Barcode component
  misc_feature (33)..(34): n is a, c, g, or t
  misc_feature (43)..(44): n is a, c, g, or t
  misc_feature (53)..(54): n is a, c, g, or t
tttttttaagcagtggtatcaacgcagagtacnngaatgagcnnggaagagtnntttttttttttttttttttttttttttttt

SEQ ID NO: 6341 - DNA, 84 bp, Artificial
  Barcode component
  misc_feature (33)..(34): n is a, c, g, or t
  misc_feature (43)..(44): n is a, c, g, or t
  misc_feature (53)..(54): n is a, c, g, or t
tttttttaagcagtggtatcaacgcagagtacnngaatgagcnnccaagtagnntttttttttttttttttttttttttttttt

SEQ ID NO: 6342 - DNA, 84 bp, Artificial
  Barcode component
  misc_feature (33)..(34): n is a, c, g, or t
  misc_feature (43)..(44): n is a, c, g, or t
  misc_feature (53)..(54): n is a, c, g, or t
tttttttaagcagtggtatcaacgcagagtacnngaatgagcnnctgaacagnntttttttttttttttttttttttttttttt

SEQ ID NO: 6343 - DNA, 84 bp, Artificial
  Barcode component
  misc_feature (33)..(34): n is a, c, g, or t
  misc_feature (43)..(44): n is a, c, g, or t
  misc_feature (53)..(54): n is a, c, g, or t
tttttttaagcagtggtatcaacgcagagtacnngaatgagcnngtaggttcnntttttttttttttttttttttttttttttt

SEQ ID NO: 6344 - DNA, 84 bp, Artificial
  Barcode component
  misc_feature (33)..(34): n is a, c, g, or t
  misc_feature (43)..(44): n is a, c, g, or t
  misc_feature (53)..(54): n is a, c, g, or t
tttttttaagcagtggtatcaacgcagagtacnngaatgagcnngtatggacnntttttttttttttttttttttttttttttt

SEQ ID NO: 6345 - DNA, 84 bp, Artificial
  Barcode component
  misc_feature (33)..(34): n is a, c, g, or t
  misc_feature (43)..(44): n is a, c, g, or t
  misc_feature (53)..(54): n is a, c, g, or t
tttttttaagcagtggtatcaacgcagagtacnngaatgagcnntcgcaacanntttttttttttttttttttttttttttttt

SEQ ID NO: 6346 - DNA, 84 bp, Artificial
  Barcode component
  misc_feature (33)..(34): n is a, c, g, or t
  misc_feature (43)..(44): n is a, c, g, or t
  misc_feature (53)..(54): n is a, c, g, or t
tttttttaagcagtggtatcaacgcagagtacnngaatgagcnnccgctaatnntttttttttttttttttttttttttttttt

SEQ ID NO: 6347 - DNA, 84 bp, Artificial
  Barcode component
  misc_feature (33)..(34): n is a, c, g, or t
  misc_feature (43)..(44): n is a, c, g, or t
  misc_feature (53)..(54): n is a, c, g, or t
tttttttaagcagtggtatcaacgcagagtacnngaatgagcnngattcgcanntttttttttttttttttttttttttttttt

SEQ ID NO: 6348 - DNA, 84 bp, Artificial
  Barcode component
  misc_feature (33)..(34): n is a, c, g, or t
  misc_feature (43)..(44): n is a, c, g, or t
  misc_feature (53)..(54): n is a, c, g, or t
tttttttaagcagtggtatcaacgcagagtacnngaatgagcnncgatggaanntttttttttttttttttttttttttttttt

SEQ ID NO: 6349 - DNA, 84 bp, Artificial
  Barcode component
  misc_feature (33)..(34): n is a, c, g, or t
  misc_feature (43)..(44): n is a, c, g, or t
  misc_feature (53)..(54): n is a, c, g, or t
tttttttaagcagtggtatcaacgcagagtacnngaatgagcnnagcaagganntttttttttttttttttttttttttttttt

SEQ ID NO: 6350 - DNA, 84 bp, Artificial
  Barcode component
  misc_feature (33)..(34): n is a, c, g, or t
  misc_feature (43)..(44): n is a, c, g, or t
  misc_feature (53)..(54): n is a, c, g, or t
tttttttaagcagtggtatcaacgcagagtacnngaatgagcnncgtagcaanntttttttttttttttttttttttttttttt

SEQ ID NO: 6351 - DNA, 84 bp, Artificial
  Barcode component
  misc_feature (33)..(34): n is a, c, g, or t
  misc_feature (43)..(44): n is a, c, g, or t
  misc_feature (53)..(54): n is a, c, g, or t
tttttttaagcagtggtatcaacgcagagtacnngaatgagcnntggcagtanntttttttttttttttttttttttttttttt

SEQ ID NO: 6352 - DNA, 84 bp, Artificial
  Barcode component
  misc_feature (33)..(34): n is a, c, g, or t
  misc_feature (43)..(44): n is a, c, g, or t
  misc_feature (53)..(54): n is a, c, g, or t
tttttttaagcagtggtatcaacgcagagtacnngaatgagcnncggtagttnntttttttttttttttttttttttttttttt

SEQ ID NO: 6353 - DNA, 84 bp, Artificial
  Barcode component
  misc_feature (33)..(34): n is a, c, g, or t
  misc_feature (43)..(44): n is a, c, g, or t
  misc_feature (53)..(54): n is a, c, g, or t
tttttttaagcagtggtatcaacgcagagtacnngaatgagcnntgacttcgnntttttttttttttttttttttttttttttt

SEQ ID NO: 6354 - DNA, 84 bp, Artificial
  Barcode component
  misc_feature (33)..(34): n is a, c, g, or t
  misc_feature (43)..(44): n is a, c, g, or t
  misc_feature (53)..(54): n is a, c, g, or t
tttttttaagcagtggtatcaacgcagagtacnngaatgagcnngagtgcaanntttttttttttttttttttttttttttttt

SEQ ID NO: 6355 - DNA, 84 bp, Artificial
  Barcode component
  misc_feature (33)..(34): n is a, c, g, or t
  misc_feature (43)..(44): n is a, c, g, or t
  misc_feature (53)..(54): n is a, c, g, or t
tttttttaagcagtggtatcaacgcagagtacnngaatgagcnnacggtaacnntttttttttttttttttttttttttttttt

SEQ ID NO: 6356 - DNA, 84 bp, Artificial
  Barcode component
  misc_feature (33)..(34): n is a, c, g, or t
  misc_feature (43)..(44): n is a, c, g, or t
  misc_feature (53)..(54): n is a, c, g, or t
tttttttaagcagtggtatcaacgcagagtacnngaatgagcnnaagtggtgnntttttttttttttttttttttttttttttt

SEQ ID NO: 6357 - DNA, 84 bp, Artificial
  Barcode component
  misc_feature (33)..(34): n is a, c, g, or t
  misc_feature (43)..(44): n is a, c, g, or t
  misc_feature (53)..(54): n is a, c, g, or t
tttttttaagcagtggtatcaacgcagagtacnngaatgagcnnggagacaanntttttttttttttttttttttttttttttt

SEQ ID NO: 6358 - DNA, 84 bp, Artificial
  Barcode component
  misc_feature (33)..(34): n is a, c, g, or t
  misc_feature (43)..(44): n is a, c, g, or t
  misc_feature (53)..(54): n is a, c, g, or t
tttttttaagcagtggtatcaacgcagagtacnngaatgagcnntcaaggacnntttttttttttttttttttttttttttttt

SEQ ID NO: 6359 - DNA, 84 bp, Artificial
  Barcode component
  misc_feature (33)..(34): n is a, c, g, or t
  misc_feature (43)..(44): n is a, c, g, or t
  misc_feature (53)..(54): n is a, c, g, or t
tttttttaagcagtggtatcaacgcagagtacnngaatgagcnnaagagagcnntttttttttttttttttttttttttttttt

SEQ ID NO: 6360 - DNA, 84 bp, Artificial
  Barcode component
  misc_feature (33)..(34): n is a, c, g, or t
  misc_feature (43)..(44): n is a, c, g, or t
  misc_feature (53)..(54): n is a, c, g, or t
tttttttaagcagtggtatcaacgcagagtacnngaatgagcnncgagagatnntttttttttttttttttttttttttttttt

SEQ ID NO: 6361 - DNA, 84 bp, Artificial
  Barcode component
  misc_feature (33)..(34): n is a, c, g, or t
  misc_feature (43)..(44): n is a, c, g, or t
  misc_feature (53)..(54): n is a, c, g, or t
tttttttaagcagtggtatcaacgcagagtacnngaatgagcnnacagatggnntttttttttttttttttttttttttttttt

SEQ ID NO: 6362 - DNA, 84 bp, Artificial
  Barcode component
  misc_feature (33)..(34): n is a, c, g, or t
  misc_feature (43)..(44): n is a, c, g, or t
  misc_feature (53)..(54): n is a, c, g, or t
tttttttaagcagtggtatcaacgcagagtacnngaatgagcnnaggagtcanntttttttttttttttttttttttttttttt

SEQ ID NO: 6363 - DNA, 84 bp, Artificial
  Barcode component
  misc_feature (33)..(34): n is a, c, g, or t
  misc_feature (43)..(44): n is a, c, g, or t
  misc_feature (53)..(54): n is a, c, g, or t
tttttttaagcagtggtatcaacgcagagtacnngaatgagcnncgtgttacnntttttttttttttttttttttttttttttt

SEQ ID NO: 6364 - DNA, 84 bp, Artificial
  Barcode component
  misc_feature (33)..(34): n is a, c, g, or t
  misc_feature (43)..(44): n is a, c, g, or t
  misc_feature (53)..(54): n is a, c, g, or t
tttttttaagcagtggtatcaacgcagagtacnngaatgagcnntagtgtgcnntttttttttttttttttttttttttttttt

SEQ ID NO: 6365 - DNA, 84 bp, Artificial
  Barcode component
  misc_feature (33)..(34): n is a, c, g, or t
  misc_feature (43)..(44): n is a, c, g, or t
  misc_feature (53)..(54): n is a, c, g, or t
tttttttaagcagtggtatcaacgcagagtacnngaatgagcnnctcatgacnntttttttttttttttttttttttttttttt

SEQ ID NO: 6366 - DNA, 84 bp, Artificial
  Barcode component
  misc_feature (33)..(34): n is a, c, g, or t
  misc_feature (43)..(44): n is a, c, g, or t
  misc_feature (53)..(54): n is a, c, g, or t
tttttttaagcagtggtatcaacgcagagtacnngaatgagcnngtatccagnntttttttttttttttttttttttttttttt

SEQ ID NO: 6367 - DNA, 84 bp, Artificial
  Barcode component
  misc_feature (33)..(34): n is a, c, g, or t
  misc_feature (43)..(44): n is a, c, g, or t
  misc_feature (53)..(54): n is a, c, g, or t
tttttttaagcagtggtatcaacgcagagtacnngaatgagcnnacgcctatnntttttttttttttttttttttttttttttt

SEQ ID NO: 6368 - DNA, 84 bp, Artificial
  Barcode component
  misc_feature (33)..(34): n is a, c, g, or t
  misc_feature (43)..(44): n is a, c, g, or t
  misc_feature (53)..(54): n is a, c, g, or t
tttttttaagcagtggtatcaacgcagagtacnngaatgagcnnaacgacctnntttttttttttttttttttttttttttttt

SEQ ID NO: 6369 - DNA, 84 bp, Artificial
  Barcode component
  misc_feature (33)..(34): n is a, c, g, or t
  misc_feature (43)..(44): n is a, c, g, or t
  misc_feature (53)..(54): n is a, c, g, or t
tttttttaagcagtggtatcaacgcagagtacnngaatgagcnnatcaggctnntttttttttttttttttttttttttttttt

SEQ ID NO: 6370 - DNA, 84 bp, Artificial
  Barcode component
  misc_feature (33)..(34): n is a, c, g, or t
  misc_feature (43)..(44): n is a, c, g, or t
  misc_feature (53)..(54): n is a, c, g, or t
tttttttaagcagtggtatcaacgcagagtacnngaatgagcnncaagttcgnntttttttttttttttttttttttttttttt

SEQ ID NO: 6371 - DNA, 84 bp, Artificial
  Barcode component
  misc_feature (33)..(34): n is a, c, g, or t
  misc_feature (43)..(44): n is a, c, g, or t
  misc_feature (53)..(54): n is a, c, g, or t
tttttttaagcagtggtatcaacgcagagtacnngaatgagcnntagccaganntttttttttttttttttttttttttttttt

SEQ ID NO: 6372 - DNA, 84 bp, Artificial
  Barcode component
  misc_feature (33)..(34): n is a, c, g, or t
  misc_feature (43)..(44): n is a, c, g, or t
  misc_feature (53)..(54): n is a, c, g, or t
tttttttaagcagtggtatcaacgcagagtacnngaatgagcnncaatcacgnntttttttttttttttttttttttttttttt

SEQ ID NO: 6373 - DNA, 84 bp, Artificial
  Barcode component
  misc_feature (33)..(34): n is a, c, g, or t
  misc_feature (43)..(44): n is a, c, g, or t
  misc_feature (53)..(54): n is a, c, g, or t
tttttttaagcagtggtatcaacgcagagtacnngaatgagcnngcaacaagnntttttttttttttttttttttttttttttt

SEQ ID NO: 6374 - DNA, 84 bp, Artificial
  Barcode component
  misc_feature (33)..(34): n is a, c, g, or t
  misc_feature (43)..(44): n is a, c, g, or t
  misc_feature (53)..(54): n is a, c, g, or t
tttttttaagcagtggtatcaacgcagagtacnngaatgagcnncacgacaanntttttttttttttttttttttttttttttt

SEQ ID NO: 6375 - DNA, 84 bp, Artificial
  Barcode component
  misc_feature (33)..(34): n is a, c, g, or t
  misc_feature (43)..(44): n is a, c, g, or t
  misc_feature (53)..(54): n is a, c, g, or t
tttttttaagcagtggtatcaacgcagagtacnngaatgagcnntacggaganntttttttttttttttttttttttttttttt

SEQ ID NO: 6376 - DNA, 84 bp, Artificial
  Barcode component
  misc_feature (33)..(34): n is a, c, g, or t
  misc_feature (43)..(44): n is a, c, g, or t
  misc_feature (53)..(54): n is a, c, g, or t
tttttttaagcagtggtatcaacgcagagtacnngaatgagcnncgacaaganntttttttttttttttttttttttttttttt

SEQ ID NO: 6377 - DNA, 84 bp, Artificial
  Barcode component
  misc_feature (33)..(34): n is a, c, g, or t
  misc_feature (43)..(44): n is a, c, g, or t
  misc_feature (53)..(54): n is a, c, g, or t
tttttttaagcagtggtatcaacgcagagtacnngaatgagcnncgaagtganntttttttttttttttttttttttttttttt

SEQ ID NO: 6378 - DNA, 84 bp, Artificial
  Barcode component
  misc_feature (33)..(34): n is a, c, g, or t
  misc_feature (43)..(44): n is a, c, g, or t
  misc_feature (53)..(54): n is a, c, g, or t
tttttttaagcagtggtatcaacgcagagtacnngaatgagcnnagctggtanntttttttttttttttttttttttttttttt

SEQ ID NO: 6379 - DNA, 84 bp, Artificial
  Barcode component
  misc_feature (33)..(34): n is a, c, g, or t
  misc_feature (43)..(44): n is a, c, g, or t
  misc_feature (53)..(54): n is a, c, g, or t
tttttttaagcagtggtatcaacgcagagtacnngaatgagcnnaactaggcnntttttttttttttttttttttttttttttt

SEQ ID NO: 6380 - DNA, 84 bp, Artificial
  Barcode component
  misc_feature (33)..(34): n is a, c, g, or t
  misc_feature (43)..(44): n is a, c, g, or t
  misc_feature (53)..(54): n is a, c, g, or t
tttttttaagcagtggtatcaacgcagagtacnngaatgagcnncagcaagtnntttttttttttttttttttttttttttttt

SEQ ID NO: 6381 - DNA, 84 bp, Artificial
  Barcode component
  misc_feature (33)..(34): n is a, c, g, or t
  misc_feature (43)..(44): n is a, c, g, or t
  misc_feature (53)..(54): n is a, c, g, or t
tttttttaagcagtggtatcaacgcagagtacnngaatgagcnnacgaggtanntttttttttttttttttttttttttttttt

SEQ ID NO: 6382 - DNA, 84 bp, Artificial
  Barcode component
  misc_feature (33)..(34): n is a, c, g, or t
  misc_feature (43)..(44): n is a, c, g, or t
  misc_feature (53)..(54): n is a, c, g, or t
tttttttaagcagtggtatcaacgcagagtacnngaatgagcnncatcttccnntttttttttttttttttttttttttttttt

SEQ ID NO: 6383 - DNA, 84 bp, Artificial
  Barcode component
  misc_feature (33)..(34): n is a, c, g, or t
  misc_feature (43)..(44): n is a, c, g, or t
  misc_feature (53)..(54): n is a, c, g, or t
tttttttaagcagtggtatcaacgcagagtacnngaatgagcnncctgaatcnntttttttttttttttttttttttttttttt

SEQ ID NO: 6384 - DNA, 84 bp, Artificial
  Barcode component
  misc_feature (33)..(34): n is a, c, g, or t
  misc_feature (43)..(44): n is a, c, g, or t
  misc_feature (53)..(54): n is a, c, g, or t
tttttttaagcagtggtatcaacgcagagtacnngaatgagcnntgcagactnntttttttttttttttttttttttttttttt

SEQ ID NO: 6385 - DNA, 84 bp, Artificial
  Barcode component
  misc_feature (33)..(34): n is a, c, g, or t
  misc_feature (43)..(44): n is a, c, g, or t
  misc_feature (53)..(54): n is a, c, g, or t
tttttttaagcagtggtatcaacgcagagtacnngaatgagcnnagatgtggnntttttttttttttttttttttttttttttt

SEQ ID NO: 6386 - DNA, 84 bp, Artificial
  Barcode component
  misc_feature (33)..(34): n is a, c, g, or t
  misc_feature (43)..(44): n is a, c, g, or t
  misc_feature (53)..(54): n is a, c, g, or t
tttttttaagcagtggtatcaacgcagagtacnngaatgagcnnagttcgacnntttttttttttttttttttttttttttttt

SEQ ID NO: 6387 - DNA, 84 bp, Artificial
  Barcode component
  misc_feature (33)..(34): n is a, c, g, or t
  misc_feature (43)..(44): n is a, c, g, or t
  misc_feature (53)..(54): n is a, c, g, or t
tttttttaagcagtggtatcaacgcagagtacnngaatgagcnnacaacctcnntttttttttttttttttttttttttttttt

SEQ ID NO: 6388 - DNA, 84 bp, Artificial
  Barcode component
  misc_feature (33)..(34): n is a, c, g, or t
  misc_feature (43)..(44): n is a, c, g, or t
  misc_feature (53)..(54): n is a, c, g, or t
tttttttaagcagtggtatcaacgcagagtacnngaatgagcnncatggtagnntttttttttttttttttttttttttttttt

SEQ ID NO: 6389 - DNA, 84 bp, Artificial
  Barcode component
  misc_feature (33)..(34): n is a, c, g, or t
  misc_feature (43)..(44): n is a, c, g, or t
  misc_feature (53)..(54): n is a, c, g, or t
tttttttaagcagtggtatcaacgcagagtacnngaatgagcnncgtatctcnntttttttttttttttttttttttttttttt

SEQ ID NO: 6390 - DNA, 84 bp, Artificial
  Barcode component
  misc_feature (33)..(34): n is a, c, g, or t
  misc_feature (43)..(44): n is a, c, g, or t
  misc_feature (53)..(54): n is a, c, g, or t
tttttttaagcagtggtatcaacgcagagtacnngaatgagcnncctagttcnntttttttttttttttttttttttttttttt

SEQ ID NO: 6391 - DNA, 84 bp, Artificial
  Barcode component
  misc_feature (33)..(34): n is a, c, g, or t
  misc_feature (43)..(44): n is a, c, g, or t
  misc_feature (53)..(54): n is a, c, g, or t
tttttttaagcagtggtatcaacgcagagtacnngaatgagcnncaagagtcnntttttttttttttttttttttttttttttt

SEQ ID NO: 6392 - DNA, 84 bp, Artificial
  Barcode component
  misc_feature (33)..(34): n is a, c, g, or t
  misc_feature (43)..(44): n is a, c, g, or t
  misc_feature (53)..(54): n is a, c, g, or t
tttttttaagcagtggtatcaacgcagagtacnngaggagaannaatcggcanntttttttttttttttttttttttttttttt

SEQ ID NO: 6393 - DNA, 84 bp, Artificial
  Barcode component
  misc_feature (33)..(34): n is a, c, g, or t
  misc_feature (43)..(44): n is a, c, g, or t
  misc_feature (53)..(54): n is a, c, g, or t
tttttttaagcagtggtatcaacgcagagtacnngaggagaanntacggcatnntttttttttttttttttttttttttttttt

SEQ ID NO: 6394 - DNA, 84 bp, Artificial
  Barcode component
  misc_feature (33)..(34): n is a, c, g, or t
  misc_feature (43)..(44): n is a, c, g, or t
  misc_feature (53)..(54): n is a, c, g, or t
tttttttaagcagtggtatcaacgcagagtacnngaggagaannttggatcgnntttttttttttttttttttttttttttttt

SEQ ID NO: 6395 - DNA, 84 bp, Artificial
  Barcode component
  misc_feature (33)..(34): n is a, c, g, or t
  misc_feature (43)..(44): n is a, c, g, or t
  misc_feature (53)..(54): n is a, c, g, or t
tttttttaagcagtggtatcaacgcagagtacnngaggagaanntggaacganntttttttttttttttttttttttttttttt

SEQ ID NO: 6396 - DNA, 84 bp, Artificial
  Barcode component
  misc_feature (33)..(34): n is a, c, g, or t
  misc_feature (43)..(44): n is a, c, g, or t
  misc_feature (53)..(54): n is a, c, g, or t
tttttttaagcagtggtatcaacgcagagtacnngaggagaannggcaatcanntttttttttttttttttttttttttttttt

SEQ ID NO: 6397 - DNA, 84 bp, Artificial
  Barcode component
  misc_feature (33)..(34): n is a, c, g, or t
  misc_feature (43)..(44): n is a, c, g, or t
  misc_feature (53)..(54): n is a, c, g, or t
tttttttaagcagtggtatcaacgcagagtacnngaggagaanngaatccganntttttttttttttttttttttttttttttt

SEQ ID NO: 6398 - DNA, 84 bp, Artificial
  Barcode component
  misc_feature (33)..(34): n is a, c, g, or t
  misc_feature (43)..(44): n is a, c, g, or t
  misc_feature (53)..(54): n is a, c, g, or t
tttttttaagcagtggtatcaacgcagagtacnngaggagaannttacggtgnntttttttttttttttttttttttttttttt

SEQ ID NO: 6399 - DNA, 84 bp, Artificial
  Barcode component
  misc_feature (33)..(34): n is a, c, g, or t
  misc_feature (43)..(44): n is a, c, g, or t
  misc_feature (53)..(54): n is a, c, g, or t
tttttttaagcagtggtatcaacgcagagtacnngaggagaanncatatcggnntttttttttttttttttttttttttttttt

SEQ ID NO: 6400 - DNA, 84 bp, Artificial
  Barcode component
  misc_feature (33)..(34): n is a, c, g, or t
  misc_feature (43)..(44): n is a, c, g, or t
  misc_feature (53)..(54): n is a, c, g, or t
tttttttaagcagtggtatcaacgcagagtacnngaggagaanncttcggtanntttttttttttttttttttttttttttttt

SEQ ID NO: 6401 - DNA, 84 bp, Artificial
  Barcode component
  misc_feature (33)..(34): n is a, c, g, or t
  misc_feature (43)..(44): n is a, c, g, or t
  misc_feature (53)..(54): n is a, c, g, or t
tttttttaagcagtggtatcaacgcagagtacnngaggagaanntcctaacgnntttttttttttttttttttttttttttttt

SEQ ID NO: 6402 - DNA, 84 bp, Artificial
  Barcode component
  misc_feature (33)..(34): n is a, c, g, or t
  misc_feature (43)..(44): n is a, c, g, or t
  misc_feature (53)..(54): n is a, c, g, or t
tttttttaagcagtggtatcaacgcagagtacnngaggagaanngtaagccanntttttttttttttttttttttttttttttt

SEQ ID NO: 6403 - DNA, 84 bp, Artificial
  Barcode component
  misc_feature (33)..(34): n is a, c, g, or t
  misc_feature (43)..(44): n is a, c, g, or t
  misc_feature (53)..(54): n is a, c, g, or t
tttttttaagcagtggtatcaacgcagagtacnngaggagaanntaaggtggnntttttttttttttttttttttttttttttt

SEQ ID NO: 6404 - DNA, 84 bp, Artificial
  Barcode component
  misc_feature (33)..(34): n is a, c, g, or t
  misc_feature (43)..(44): n is a, c, g, or t
  misc_feature (53)..(54): n is a, c, g, or t
tttttttaagcagtggtatcaacgcagagtacnngaggagaannggtaagctnntttttttttttttttttttttttttttttt

SEQ ID NO: 6405 - DNA, 84 bp, Artificial
  Barcode component
  misc_feature (33)..(34): n is a, c, g, or t
  misc_feature (43)..(44): n is a, c, g, or t
  misc_feature (53)..(54): n is a, c, g, or t
tttttttaagcagtggtatcaacgcagagtacnngaggagaanntgtgtcganntttttttttttttttttttttttttttttt

SEQ ID NO: 6406 - DNA, 84 bp, Artificial
  Barcode component
  misc_feature (33)..(34): n is a, c, g, or t
  misc_feature (43)..(44): n is a, c, g, or t
  misc_feature (53)..(54): n is a, c, g, or t
tttttttaagcagtggtatcaacgcagagtacnngaggagaanngagcatganntttttttttttttttttttttttttttttt

SEQ ID NO: 6407 - DNA, 84 bp, Artificial
  Barcode component
  misc_feature (33)..(34): n is a, c, g, or t
  misc_feature (43)..(44): n is a, c, g, or t
  misc_feature (53)..(54): n is a, c, g, or t
tttttttaagcagtggtatcaacgcagagtacnngaggagaanntcgaagtcnntttttttttttttttttttttttttttttt

SEQ ID NO: 6408 - DNA, 84 bp, Artificial
  Barcode component
  misc_feature (33)..(34): n is a, c, g, or t
  misc_feature (43)..(44): n is a, c, g, or t
  misc_feature (53)..(54): n is a, c, g, or t
tttttttaagcagtggtatcaacgcagagtacnngaggagaannggtgaacanntttttttttttttttttttttttttttttt

SEQ ID NO: 6409 - DNA, 84 bp, Artificial
  Barcode component
  misc_feature (33)..(34): n is a, c, g, or t
  misc_feature (43)..(44): n is a, c, g, or t
  misc_feature (53)..(54): n is a, c, g, or t
tttttttaagcagtggtatcaacgcagagtacnngaggagaannacatgcacnntttttttttttttttttttttttttttttt

SEQ ID NO: 6410 - DNA, 84 bp, Artificial
  Barcode component
  misc_feature (33)..(34): n is a, c, g, or t
  misc_feature (43)..(44): n is a, c, g, or t
  misc_feature (53)..(54): n is a, c, g, or t
tttttttaagcagtggtatcaacgcagagtacnngaggagaannccaacagtnntttttttttttttttttttttttttttttt

SEQ ID NO: 6411 - DNA, 84 bp, Artificial
  Barcode component
  misc_feature (33)..(34): n is a, c, g, or t
  misc_feature (43)..(44): n is a, c, g, or t
  misc_feature (53)..(54): n is a, c, g, or t
tttttttaagcagtggtatcaacgcagagtacnngaggagaannagaacagcnntttttttttttttttttttttttttttttt

SEQ ID NO: 6412 - DNA, 84 bp, Artificial
  Barcode component
  misc_feature (33)..(34): n is a, c, g, or t
  misc_feature (43)..(44): n is a, c, g, or t
  misc_feature (53)..(54): n is a, c, g, or t
tttttttaagcagtggtatcaacgcagagtacnngaggagaanngaacacgtnntttttttttttttttttttttttttttttt

SEQ ID NO: 6413 - DNA, 84 bp, Artificial
  Barcode component
  misc_feature (33)..(34): n is a, c, g, or t
  misc_feature (43)..(44): n is a, c, g, or t
  misc_feature (53)..(54): n is a, c, g, or t
tttttttaagcagtggtatcaacgcagagtacnngaggagaannggtcttcanntttttttttttttttttttttttttttttt

SEQ ID NO: 6414 - DNA, 84 bp, Artificial
  Barcode component
  misc_feature (33)..(34): n is a, c, g, or t
  misc_feature (43)..(44): n is a, c, g, or t
  misc_feature (53)..(54): n is a, c, g, or t
tttttttaagcagtggtatcaacgcagagtacnngaggagaannaggttcagnntttttttttttttttttttttttttttttt

SEQ ID NO: 6415 - DNA, 84 bp, Artificial
  Barcode component
  misc_feature (33)..(34): n is a, c, g, or t
  misc_feature (43)..(44): n is a, c, g, or t
  misc_feature (53)..(54): n is a, c, g, or t
tttttttaagcagtggtatcaacgcagagtacnngaggagaannctagagcanntttttttttttttttttttttttttttttt

SEQ ID NO: 6416 - DNA, 84 bp, Artificial
  Barcode component
  misc_feature (33)..(34): n is a, c, g, or t
  misc_feature (43)..(44): n is a, c, g, or t
  misc_feature (53)..(54): n is a, c, g, or t
tttttttaagcagtggtatcaacgcagagtacnngaggagaanncttctagcnntttttttttttttttttttttttttttttt

SEQ ID NO: 6417 - DNA, 84 bp, Artificial
  Barcode component
  misc_feature (33)..(34): n is a, c, g, or t
  misc_feature (43)..(44): n is a, c, g, or t
  misc_feature (53)..(54): n is a, c, g, or t
tttttttaagcagtggtatcaacgcagagtacnngaggagaanngagtaacgnntttttttttttttttttttttttttttttt

SEQ ID NO: 6418 - DNA, 84 bp, Artificial
  Barcode component
  misc_feature (33)..(34): n is a, c, g, or t
  misc_feature (43)..(44): n is a, c, g, or t
  misc_feature (53)..(54): n is a, c, g, or t
tttttttaagcagtggtatcaacgcagagtacnngaggagaannctaagaggnntttttttttttttttttttttttttttttt

SEQ ID NO: 6419 - DNA, 84 bp, Artificial
  Barcode component
  misc_feature (33)..(34): n is a, c, g, or t
  misc_feature (43)..(44): n is a, c, g, or t
  misc_feature (53)..(54): n is a, c, g, or t
tttttttaagcagtggtatcaacgcagagtacnngaggagaannacgtgtagnntttttttttttttttttttttttttttttt

SEQ ID NO: 6420 - DNA, 84 bp, Artificial
  Barcode component
  misc_feature (33)..(34): n is a, c, g, or t
  misc_feature (43)..(44): n is a, c, g, or t
  misc_feature (53)..(54): n is a, c, g, or t
tttttttaagcagtggtatcaacgcagagtacnngaggagaannactacaggnntttttttttttttttttttttttttttttt

SEQ ID NO: 6421 - DNA, 84 bp, Artificial
  Barcode component
  misc_feature (33)..(34): n is a, c, g, or t
  misc_feature (43)..(44): n is a, c, g, or t
  misc_feature (53)..(54): n is a, c, g, or t
tttttttaagcagtggtatcaacgcagagtacnngaggagaanntacaggtcnntttttttttttttttttttttttttttttt

SEQ ID NO: 6422 - DNA, 84 bp, Artificial
  Barcode component
  misc_feature (33)..(34): n is a, c, g, or t
  misc_feature (43)..(44): n is a, c, g, or t
  misc_feature (53)..(54): n is a, c, g, or t
tttttttaagcagtggtatcaacgcagagtacnngaggagaannctcacatgnntttttttttttttttttttttttttttttt

SEQ ID NO: 6423 - DNA, 84 bp, Artificial
  Barcode component
  misc_feature (33)..(34): n is a, c, g, or t
  misc_feature (43)..(44): n is a, c, g, or t
  misc_feature (53)..(54): n is a, c, g, or t
tttttttaagcagtggtatcaacgcagagtacnngaggagaannactaggagnntttttttttttttttttttttttttttttt

SEQ ID NO: 6424 - DNA, 84 bp, Artificial
  Barcode component
  misc_feature (33)..(34): n is a, c, g, or t
  misc_feature (43)..(44): n is a, c, g, or t
  misc_feature (53)..(54): n is a, c, g, or t
tttttttaagcagtggtatcaacgcagagtacnngaggagaannccatagganntttttttttttttttttttttttttttttt

SEQ ID NO: 6425 - DNA, 84 bp, Artificial
  Barcode component
  misc_feature (33)..(34): n is a, c, g, or t
  misc_feature (43)..(44): n is a, c, g, or t
  misc_feature (53)..(54): n is a, c, g, or t
tttttttaagcagtggtatcaacgcagagtacnngaggagaannggagaatcnntttttttttttttttttttttttttttttt

SEQ ID NO: 6426 - DNA, 84 bp, Artificial
  Barcode component
  misc_feature (33)..(34): n is a, c, g, or t
  misc_feature (43)..(44): n is a, c, g, or t
  misc_feature (53)..(54): n is a, c, g, or t
tttttttaagcagtggtatcaacgcagagtacnngaggagaanngccaagaanntttttttttttttttttttttttttttttt

SEQ ID NO: 6427 - DNA, 84 bp, Artificial
  Barcode component
  misc_feature (33)..(34): n is a, c, g, or t
  misc_feature (43)..(44): n is a, c, g, or t
  misc_feature (53)..(54): n is a, c, g, or t
tttttttaagcagtggtatcaacgcagagtacnngaggagaannaaggcaagnntttttttttttttttttttttttttttttt

SEQ ID NO: 6428 - DNA, 84 bp, Artificial
  Barcode component
  misc_feature (33)..(34): n is a, c, g, or t
  misc_feature (43)..(44): n is a, c, g, or t
  misc_feature (53)..(54): n is a, c, g, or t
tttttttaagcagtggtatcaacgcagagtacnngaggagaannaatgtcgcnntttttttttttttttttttttttttttttt

SEQ ID NO: 6429 - DNA, 84 bp, Artificial
  Barcode component
  misc_feature (33)..(34): n is a, c, g, or t
  misc_feature (43)..(44): n is a, c, g, or t
  misc_feature (53)..(54): n is a, c, g, or t
tttttttaagcagtggtatcaacgcagagtacnngaggagaannatggaaccnntttttttttttttttttttttttttttttt

SEQ ID NO: 6430 - DNA, 84 bp, Artificial
  Barcode component
  misc_feature (33)..(34): n is a, c, g, or t
  misc_feature (43)..(44): n is a, c, g, or t
  misc_feature (53)..(54): n is a, c, g, or t
tttttttaagcagtggtatcaacgcagagtacnngaggagaannagaggcatnntttttttttttttttttttttttttttttt

SEQ ID NO: 6431 - DNA, 84 bp, Artificial
  Barcode component
  misc_feature (33)..(34): n is a, c, g, or t
  misc_feature (43)..(44): n is a, c, g, or t
  misc_feature (53)..(54): n is a, c, g, or t
tttttttaagcagtggtatcaacgcagagtacnngaggagaanntgcatagcnntttttttttttttttttttttttttttttt

SEQ ID NO: 6432 - DNA, 84 bp, Artificial
  Barcode component
  misc_feature (33)..(34): n is a, c, g, or t
  misc_feature (43)..(44): n is a, c, g, or t
  misc_feature (53)..(54): n is a, c, g, or t
tttttttaagcagtggtatcaacgcagagtacnngaggagaannctaacgganntttttttttttttttttttttttttttttt

SEQ ID NO: 6433 - DNA, 84 bp, Artificial
  Barcode component
  misc_feature (33)..(34): n is a, c, g, or t
  misc_feature (43)..(44): n is a, c, g, or t
  misc_feature (53)..(54): n is a, c, g, or t
tttttttaagcagtggtatcaacgcagagtacnngaggagaanntatcgaggnntttttttttttttttttttttttttttttt

SEQ ID NO: 6434 - DNA, 84 bp, Artificial
  Barcode component
  misc_feature (33)..(34): n is a, c, g, or t
  misc_feature (43)..(44): n is a, c, g, or t
  misc_feature (53)..(54): n is a, c, g, or t
tttttttaagcagtggtatcaacgcagagtacnngaggagaanncatagcctnntttttttttttttttttttttttttttttt

SEQ ID NO: 6435 - DNA, 84 bp, Artificial
  Barcode component
  misc_feature (33)..(34): n is a, c, g, or t
  misc_feature (43)..(44): n is a, c, g, or t
  misc_feature (53)..(54): n is a, c, g, or t
tttttttaagcagtggtatcaacgcagagtacnngaggagaannatcgagacnntttttttttttttttttttttttttttttt

SEQ ID NO: 6436 - DNA, 84 bp, Artificial
  Barcode component
  misc_feature (33)..(34): n is a, c, g, or t
  misc_feature (43)..(44): n is a, c, g, or t
  misc_feature (53)..(54): n is a, c, g, or t
tttttttaagcagtggtatcaacgcagagtacnngaggagaannggaagagtnntttttttttttttttttttttttttttttt

SEQ ID NO: 6437 - DNA, 84 bp, Artificial
  Barcode component
  misc_feature (33)..(34): n is a, c, g, or t
  misc_feature (43)..(44): n is a, c, g, or t
  misc_feature (53)..(54): n is a, c, g, or t
tttttttaagcagtggtatcaacgcagagtacnngaggagaannccaagtagnntttttttttttttttttttttttttttttt

SEQ ID NO: 6438 - DNA, 84 bp, Artificial
  Barcode component
  misc_feature (33)..(34): n is a, c, g, or t
  misc_feature (43)..(44): n is a, c, g, or t
  misc_feature (53)..(54): n is a, c, g, or t
tttttttaagcagtggtatcaacgcagagtacnngaggagaannctgaacagnntttttttttttttttttttttttttttttt

SEQ ID NO: 6439 - DNA, 84 bp, Artificial
  Barcode component
  misc_feature (33)..(34): n is a, c, g, or t
  misc_feature (43)..(44): n is a, c, g, or t
  misc_feature (53)..(54): n is a, c, g, or t
tttttttaagcagtggtatcaacgcagagtacnngaggagaanngtaggttcnntttttttttttttttttttttttttttttt

SEQ ID NO: 6440 - DNA, 84 bp, Artificial
  Barcode component
  misc_feature (33)..(34): n is a, c, g, or t
  misc_feature (43)..(44): n is a, c, g, or t
  misc_feature (53)..(54): n is a, c, g, or t
tttttttaagcagtggtatcaacgcagagtacnngaggagaanngtatggacnntttttttttttttttttttttttttttttt

SEQ ID NO: 6441 - DNA, 84 bp, Artificial
  Barcode component
  misc_feature (33)..(34): n is a, c, g, or t
  misc_feature (43)..(44): n is a, c, g, or t
  misc_feature (53)..(54): n is a, c, g, or t
tttttttaagcagtggtatcaacgcagagtacnngaggagaanntcgcaacanntttttttttttttttttttttttttttttt

SEQ ID NO: 6442 - DNA, 84 bp, Artificial
  Barcode component
  misc_feature (33)..(34): n is a, c, g, or t
  misc_feature (43)..(44): n is a, c, g, or t
  misc_feature (53)..(54): n is a, c, g, or t
tttttttaagcagtggtatcaacgcagagtacnngaggagaannccgctaatnntttttttttttttttttttttttttttttt

SEQ ID NO: 6443 - DNA, 84 bp, Artificial
  Barcode component
  misc_feature (33)..(34): n is a, c, g, or t
  misc_feature (43)..(44): n is a, c, g, or t
  misc_feature (53)..(54): n is a, c, g, or t
tttttttaagcagtggtatcaacgcagagtacnngaggagaanngattcgcanntttttttttttttttttttttttttttttt

SEQ ID NO: 6444 - DNA, 84 bp, Artificial
  Barcode component
  misc_feature (33)..(34): n is a, c, g, or t
  misc_feature (43)..(44): n is a, c, g, or t
  misc_feature (53)..(54): n is a, c, g, or t
tttttttaagcagtggtatcaacgcagagtacnngaggagaanncgatggaanntttttttttttttttttttttttttttttt

SEQ ID NO: 6445 - DNA, 84 bp, Artificial
  Barcode component
  misc_feature (33)..(34): n is a, c, g, or t
  misc_feature (43)..(44): n is a, c, g, or t
  misc_feature (53)..(54): n is a, c, g, or t
tttttttaagcagtggtatcaacgcagagtacnngaggagaannagcaagganntttttttttttttttttttttttttttttt

SEQ ID NO: 6446 - DNA, 84 bp, Artificial
  Barcode component
  misc_feature (33)..(34): n is a, c, g, or t
  misc_feature (43)..(44): n is a, c, g, or t
  misc_feature (53)..(54): n is a, c, g, or t
tttttttaagcagtggtatcaacgcagagtacnngaggagaanncgtagcaanntttttttttttttttttttttttttttttt

SEQ ID NO: 6447 - DNA, 84 bp, Artificial
  Barcode component
  misc_feature (33)..(34): n is a, c, g, or t
  misc_feature (43)..(44): n is a, c, g, or t
  misc_feature (53)..(54): n is a, c, g, or t
tttttttaagcagtggtatcaacgcagagtacnngaggagaanntggcagtanntttttttttttttttttttttttttttttt

SEQ ID NO: 6448 - DNA, 84 bp, Artificial
  Barcode component
  misc_feature (33)..(34): n is a, c, g, or t
  misc_feature (43)..(44): n is a, c, g, or t
  misc_feature (53)..(54): n is a, c, g, or t
tttttttaagcagtggtatcaacgcagagtacnngaggagaanncggtagttnntttttttttttttttttttttttttttttt

SEQ ID NO: 6449 - DNA, 84 bp, Artificial
  Barcode component
  misc_feature (33)..(34): n is a, c, g, or t
  misc_feature (43)..(44): n is a, c, g, or t
  misc_feature (53)..(54): n is a, c, g, or t
tttttttaagcagtggtatcaacgcagagtacnngaggagaanntgacttcgnntttttttttttttttttttttttttttttt

SEQ ID NO: 6450 - DNA, 84 bp, Artificial
  Barcode component
  misc_feature (33)..(34): n is a, c, g, or t
  misc_feature (43)..(44): n is a, c, g, or t
  misc_feature (53)..(54): n is a, c, g, or t
tttttttaagcagtggtatcaacgcagagtacnngaggagaanngagtgcaanntttttttttttttttttttttttttttttt

SEQ ID NO: 6451 - DNA, 84 bp, Artificial
  Barcode component
  misc_feature (33)..(34): n is a, c, g, or t
  misc_feature (43)..(44): n is a, c, g, or t
  misc_feature (53)..(54): n is a, c, g, or t
tttttttaagcagtggtatcaacgcagagtacnngaggagaannacggtaacnntttttttttttttttttttttttttttttt

SEQ ID NO: 6452 - DNA, 84 bp, Artificial
  Barcode component
  misc_feature (33)..(34): n is a, c, g, or t
  misc_feature (43)..(44): n is a, c, g, or t
  misc_feature (53)..(54): n is a, c, g, or t
tttttttaagcagtggtatcaacgcagagtacnngaggagaannaagtggtgnntttttttttttttttttttttttttttttt

SEQ ID NO: 6453 - DNA, 84 bp, Artificial
  Barcode component
  misc_feature (33)..(34): n is a, c, g, or t
  misc_feature (43)..(44): n is a, c, g, or t
  misc_feature (53)..(54): n is a, c, g, or t
tttttttaagcagtggtatcaacgcagagtacnngaggagaannggagacaanntttttttttttttttttttttttttttttt

SEQ ID NO: 6454 - DNA, 84 bp, Artificial
  Barcode component
  misc_feature (33)..(34): n is a, c, g, or t
  misc_feature (43)..(44): n is a, c, g, or t
  misc_feature (53)..(54): n is a, c, g, or t
tttttttaagcagtggtatcaacgcagagtacnngaggagaanntcaaggacnntttttttttttttttttttttttttttttt

SEQ ID NO: 6455 - DNA, 84 bp, Artificial
  Barcode component
  misc_feature (33)..(34): n is a, c, g, or t
  misc_feature (43)..(44): n is a, c, g, or t
  misc_feature (53)..(54): n is a, c, g, or t
tttttttaagcagtggtatcaacgcagagtacnngaggagaannaagagagcnntttttttttttttttttttttttttttttt

SEQ ID NO: 6456 - DNA, 84 bp, Artificial
  Barcode component
  misc_feature (33)..(34): n is a, c, g, or t
  misc_feature (43)..(44): n is a, c, g, or t
  misc_feature (53)..(54): n is a, c, g, or t
tttttttaagcagtggtatcaacgcagagtacnngaggagaanncgagagatnntttttttttttttttttttttttttttttt

SEQ ID NO: 6457 - DNA, 84 bp, Artificial
  Barcode component
  misc_feature (33)..(34): n is a, c, g, or t
  misc_feature (43)..(44): n is a, c, g, or t
  misc_feature (53)..(54): n is a, c, g, or t
tttttttaagcagtggtatcaacgcagagtacnngaggagaannacagatggnntttttttttttttttttttttttttttttt

SEQ ID NO: 6458 - DNA, 84 bp, Artificial
  Barcode component
  misc_feature (33)..(34): n is a, c, g, or t
  misc_feature (43)..(44): n is a, c, g, or t
  misc_feature (53)..(54): n is a, c, g, or t
tttttttaagcagtggtatcaacgcagagtacnngaggagaannaggagtcanntttttttttttttttttttttttttttttt

SEQ ID NO: 6459 - DNA, 84 bp, Artificial
  Barcode component
  misc_feature (33)..(34): n is a, c, g, or t
  misc_feature (43)..(44): n is a, c, g, or t
  misc_feature (53)..(54): n is a, c, g, or t
tttttttaagcagtggtatcaacgcagagtacnngaggagaanncgtgttacnntttttttttttttttttttttttttttttt

SEQ ID NO: 6460 - DNA, 84 bp, Artificial
  Barcode component
  misc_feature (33)..(34): n is a, c, g, or t
  misc_feature (43)..(44): n is a, c, g, or t
  misc_feature (53)..(54): n is a, c, g, or t
tttttttaagcagtggtatcaacgcagagtacnngaggagaanntagtgtgcnntttttttttttttttttttttttttttttt

SEQ ID NO: 6461 - DNA, 84 bp, Artificial
  Barcode component
  misc_feature (33)..(34): n is a, c, g, or t
  misc_feature (43)..(44): n is a, c, g, or t
  misc_feature (53)..(54): n is a, c, g, or t
tttttttaagcagtggtatcaacgcagagtacnngaggagaannctcatgacnntttttttttttttttttttttttttttttt

SEQ ID NO: 6462 - DNA, 84 bp, Artificial
  Barcode component
  misc_feature (33)..(34): n is a, c, g, or t
  misc_feature (43)..(44): n is a, c, g, or t
  misc_feature (53)..(54): n is a, c, g, or t
tttttttaagcagtggtatcaacgcagagtacnngaggagaanngtatccagnntttttttttttttttttttttttttttttt

SEQ ID NO: 6463 - DNA, 84 bp, Artificial
  Barcode component
  misc_feature (33)..(34): n is a, c, g, or t
  misc_feature (43)..(44): n is a, c, g, or t
  misc_feature (53)..(54): n is a, c, g, or t
tttttttaagcagtggtatcaacgcagagtacnngaggagaannacgcctatnntttttttttttttttttttttttttttttt

SEQ ID NO: 6464 - DNA, 84 bp, Artificial
  Barcode component
  misc_feature (33)..(34): n is a, c, g, or t
  misc_feature (43)..(44): n is a, c, g, or t
  misc_feature (53)..(54): n is a, c, g, or t
tttttttaagcagtggtatcaacgcagagtacnngaggagaannaacgacctnntttttttttttttttttttttttttttttt

SEQ ID NO: 6465 - DNA, 84 bp, Artificial
  Barcode component
  misc_feature (33)..(34): n is a, c, g, or t
  misc_feature (43)..(44): n is a, c, g, or t
  misc_feature (53)..(54): n is a, c, g, or t
tttttttaagcagtggtatcaacgcagagtacnngaggagaannatcaggctnntttttttttttttttttttttttttttttt

SEQ ID NO: 6466 - DNA, 84 bp, Artificial
  Barcode component
  misc_feature (33)..(34): n is a, c, g, or t
  misc_feature (43)..(44): n is a, c, g, or t
  misc_feature (53)..(54): n is a, c, g, or t
tttttttaagcagtggtatcaacgcagagtacnngaggagaanncaagttcgnntttttttttttttttttttttttttttttt

SEQ ID NO: 6467 - DNA, 84 bp, Artificial
  Barcode component
  misc_feature (33)..(34): n is a, c, g, or t
  misc_feature (43)..(44): n is a, c, g, or t
  misc_feature (53)..(54): n is a, c, g, or t
tttttttaagcagtggtatcaacgcagagtacnngaggagaanntagccaganntttttttttttttttttttttttttttttt

SEQ ID NO: 6468 - DNA, 84 bp, Artificial
  Barcode component
  misc_feature (33)..(34): n is a, c, g, or t
  misc_feature (43)..(44): n is a, c, g, or t
  misc_feature (53)..(54): n is a, c, g, or t
tttttttaagcagtggtatcaacgcagagtacnngaggagaanncaatcacgnntttttttttttttttttttttttttttttt

SEQ ID NO: 6469 - DNA, 84 bp, Artificial
  Barcode component
  misc_feature (33)..(34): n is a, c, g, or t
  misc_feature (43)..(44): n is a, c, g, or t
  misc_feature (53)..(54): n is a, c, g, or t
tttttttaagcagtggtatcaacgcagagtacnngaggagaanngcaacaagnntttttttttttttttttttttttttttttt

SEQ ID NO: 6470 - DNA, 84 bp, Artificial
  Barcode component
  misc_feature (33)..(34): n is a, c, g, or t
  misc_feature (43)..(44): n is a, c, g, or t
  misc_feature (53)..(54): n is a, c, g, or t
tttttttaagcagtggtatcaacgcagagtacnngaggagaanncacgacaanntttttttttttttttttttttttttttttt

SEQ ID NO: 6471 - DNA, 84 bp, Artificial
  Barcode component
  misc_feature (33)..(34): n is a, c, g, or t
  misc_feature (43)..(44): n is a, c, g, or t
  misc_feature (53)..(54): n is a, c, g, or t
tttttttaagcagtggtatcaacgcagagtacnngaggagaanntacggaganntttttttttttttttttttttttttttttt

SEQ ID NO: 6472 - DNA, 84 bp, Artificial
  Barcode component
  misc_feature (33)..(34): n is a, c, g, or t
  misc_feature (43)..(44): n is a, c, g, or t
  misc_feature (53)..(54): n is a, c, g, or t
tttttttaagcagtggtatcaacgcagagtacnngaggagaanncgacaaganntttttttttttttttttttttttttttttt

SEQ ID NO: 6473 - DNA, 84 bp, Artificial
  Barcode component
  misc_feature (33)..(34): n is a, c, g, or t
  misc_feature (43)..(44): n is a, c, g, or t
  misc_feature (53)..(54): n is a, c, g, or t
tttttttaagcagtggtatcaacgcagagtacnngaggagaanncgaagtganntttttttttttttttttttttttttttttt

SEQ ID NO: 6474 - DNA, 84 bp, Artificial
  Barcode component
  misc_feature (33)..(34): n is a, c, g, or t
  misc_feature (43)..(44): n is a, c, g, or t
  misc_feature (53)..(54): n is a, c, g, or t
tttttttaagcagtggtatcaacgcagagtacnngaggagaannagctggtanntttttttttttttttttttttttttttttt

SEQ ID NO: 6475 - DNA, 84 bp, Artificial
  Barcode component
  misc_feature (33)..(34): n is a, c, g, or t
  misc_feature (43)..(44): n is a, c, g, or t
  misc_feature (53)..(54): n is a, c, g, or t
tttttttaagcagtggtatcaacgcagagtacnngaggagaannaactaggcnntttttttttttttttttttttttttttttt

SEQ ID NO: 6476 - DNA, 84 bp, Artificial
  Barcode component
  misc_feature (33)..(34): n is a, c, g, or t
  misc_feature (43)..(44): n is a, c, g, or t
  misc_feature (53)..(54): n is a, c, g, or t
tttttttaagcagtggtatcaacgcagagtacnngaggagaanncagcaagtnntttttttttttttttttttttttttttttt

SEQ ID NO: 6477 - DNA, 84 bp, Artificial
  Barcode component
  misc_feature (33)..(34): n is a, c, g, or t
  misc_feature (43)..(44): n is a, c, g, or t
  misc_feature (53)..(54): n is a, c, g, or t
tttttttaagcagtggtatcaacgcagagtacnngaggagaannacgaggtanntttttttttttttttttttttttttttttt

SEQ ID NO: 6478 - DNA, 84 bp, Artificial
  Barcode component
  misc_feature (33)..(34): n is a, c, g, or t
  misc_feature (43)..(44): n is a, c, g, or t
  misc_feature (53)..(54): n is a, c, g, or t
tttttttaagcagtggtatcaacgcagagtacnngaggagaanncatcttccnntttttttttttttttttttttttttttttt

SEQ ID NO: 6479 - DNA, 84 bp, Artificial
  Barcode component
  misc_feature (33)..(34): n is a, c, g, or t
  misc_feature (43)..(44): n is a, c, g, or t
  misc_feature (53)..(54): n is a, c, g, or t
tttttttaagcagtggtatcaacgcagagtacnngaggagaanncctgaatcnntttttttttttttttttttttttttttttt

SEQ ID NO: 6480 - DNA, 84 bp, Artificial
  Barcode component
  misc_feature (33)..(34): n is a, c, g, or t
  misc_feature (43)..(44): n is a, c, g, or t
  misc_feature (53)..(54): n is a, c, g, or t
tttttttaagcagtggtatcaacgcagagtacnngaggagaanntgcagactnntttttttttttttttttttttttttttttt

SEQ ID NO: 6481 - DNA, 84 bp, Artificial
  Barcode component
  misc_feature (33)..(34): n is a, c, g, or t
  misc_feature (43)..(44): n is a, c, g, or t
  misc_feature (53)..(54): n is a, c, g, or t
tttttttaagcagtggtatcaacgcagagtacnngaggagaannagatgtggnntttttttttttttttttttttttttttttt

SEQ ID NO: 6482 - DNA, 84 bp, Artificial
  Barcode component
  misc_feature (33)..(34): n is a, c, g, or t
  misc_feature (43)..(44): n is a, c, g, or t
  misc_feature (53)..(54): n is a, c, g, or t
tttttttaagcagtggtatcaacgcagagtacnngaggagaannagttcgacnntttttttttttttttttttttttttttttt

SEQ ID NO: 6483 - DNA, 84 bp, Artificial
  Barcode component
  misc_feature (33)..(34): n is a, c, g, or t
  misc_feature (43)..(44): n is a, c, g, or t
  misc_feature (53)..(54): n is a, c, g, or t
tttttttaagcagtggtatcaacgcagagtacnngaggagaannacaacctcnntttttttttttttttttttttttttttttt

SEQ ID NO: 6484 - DNA, 84 bp, Artificial
  Barcode component
  misc_feature (33)..(34): n is a, c, g, or t
  misc_feature (43)..(44): n is a, c, g, or t
  misc_feature (53)..(54): n is a, c, g, or t
tttttttaagcagtggtatcaacgcagagtacnngaggagaanncatggtagnntttttttttttttttttttttttttttttt

SEQ ID NO: 6485 - DNA, 84 bp, Artificial
  Barcode component
  misc_feature (33)..(34): n is a, c, g, or t
  misc_feature (43)..(44): n is a, c, g, or t
  misc_feature (53)..(54): n is a, c, g, or t
tttttttaagcagtggtatcaacgcagagtacnngaggagaanncgtatctcnntttttttttttttttttttttttttttttt

SEQ ID NO: 6486 - DNA, 84 bp, Artificial
  Barcode component
  misc_feature (33)..(34): n is a, c, g, or t
  misc_feature (43)..(44): n is a, c, g, or t
  misc_feature (53)..(54): n is a, c, g, or t
tttttttaagcagtggtatcaacgcagagtacnngaggagaanncctagttcnntttttttttttttttttttttttttttttt

SEQ ID NO: 6487 - DNA, 84 bp, Artificial
  Barcode component
  misc_feature (33)..(34): n is a, c, g, or t
  misc_feature (43)..(44): n is a, c, g, or t
  misc_feature (53)..(54): n is a, c, g, or t
tttttttaagcagtggtatcaacgcagagtacnngaggagaanncaagagtcnntttttttttttttttttttttttttttttt

SEQ ID NO: 6488 - DNA, 84 bp, Artificial
  Barcode component
  misc_feature (33)..(34): n is a, c, g, or t
  misc_feature (43)..(44): n is a, c, g, or t
  misc_feature (53)..(54): n is a, c, g, or t
tttttttaagcagtggtatcaacgcagagtacnngagatggtnnaatcggcanntttttttttttttttttttttttttttttt

SEQ ID NO: 6489 - DNA, 84 bp, Artificial
  Barcode component
  misc_feature (33)..(34): n is a, c, g, or t
  misc_feature (43)..(44): n is a, c, g, or t
  misc_feature (53)..(54): n is a, c, g, or t
tttttttaagcagtggtatcaacgcagagtacnngagatggtnntacggcatnntttttttttttttttttttttttttttttt

SEQ ID NO: 6490 - DNA, 84 bp, Artificial
  Barcode component
  misc_feature (33)..(34): n is a, c, g, or t
  misc_feature (43)..(44): n is a, c, g, or t
  misc_feature (53)..(54): n is a, c, g, or t
tttttttaagcagtggtatcaacgcagagtacnngagatggtnnttggatcgnntttttttttttttttttttttttttttttt

SEQ ID NO: 6491 - DNA, 84 bp, Artificial
  Barcode component
  misc_feature (33)..(34): n is a, c, g, or t
  misc_feature (43)..(44): n is a, c, g, or t
  misc_feature (53)..(54): n is a, c, g, or t
tttttttaagcagtggtatcaacgcagagtacnngagatggtnntggaacganntttttttttttttttttttttttttttttt

SEQ ID NO: 6492 - DNA, 84 bp, Artificial
  Barcode component
  misc_feature (33)..(34): n is a, c, g, or t
  misc_feature (43)..(44): n is a, c, g, or t
  misc_feature (53)..(54): n is a, c, g, or t
tttttttaagcagtggtatcaacgcagagtacnngagatggtnnggcaatcanntttttttttttttttttttttttttttttt

SEQ ID NO: 6493 - DNA, 84 bp, Artificial
  Barcode component
  misc_feature (33)..(34): n is a, c, g, or t
  misc_feature (43)..(44): n is a, c, g, or t
  misc_feature (53)..(54): n is a, c, g, or t
tttttttaagcagtggtatcaacgcagagtacnngagatggtnngaatccganntttttttttttttttttttttttttttttt

SEQ ID NO: 6494 - DNA, 84 bp, Artificial
  Barcode component
  misc_feature (33)..(34): n is a, c, g, or t
  misc_feature (43)..(44): n is a, c, g, or t
  misc_feature (53)..(54): n is a, c, g, or t
tttttttaagcagtggtatcaacgcagagtacnngagatggtnnttacggtgnntttttttttttttttttttttttttttttt

SEQ ID NO: 6495 - DNA, 84 bp, Artificial
  Barcode component
  misc_feature (33)..(34): n is a, c, g, or t
  misc_feature (43)..(44): n is a, c, g, or t
  misc_feature (53)..(54): n is a, c, g, or t
tttttttaagcagtggtatcaacgcagagtacnngagatggtnncatatcggnntttttttttttttttttttttttttttttt

SEQ ID NO: 6496 - DNA, 84 bp, Artificial
  Barcode component
  misc_feature (33)..(34): n is a, c, g, or t
  misc_feature (43)..(44): n is a, c, g, or t
  misc_feature (53)..(54): n is a, c, g, or t
tttttttaagcagtggtatcaacgcagagtacnngagatggtnncttcggtanntttttttttttttttttttttttttttttt

SEQ ID NO: 6497 - DNA, 84 bp, Artificial
  Barcode component
  misc_feature (33)..(34): n is a, c, g, or t
  misc_feature (43)..(44): n is a, c, g, or t
  misc_feature (53)..(54): n is a, c, g, or t
tttttttaagcagtggtatcaacgcagagtacnngagatggtnntcctaacgnntttttttttttttttttttttttttttttt

SEQ ID NO: 6498 - DNA, 84 bp, Artificial
  Barcode component
  misc_feature (33)..(34): n is a, c, g, or t
  misc_feature (43)..(44): n is a, c, g, or t
  misc_feature (53)..(54): n is a, c, g, or t
tttttttaagcagtggtatcaacgcagagtacnngagatggtnngtaagccanntttttttttttttttttttttttttttttt

SEQ ID NO: 6499 - DNA, 84 bp, Artificial
  Barcode component
  misc_feature (33)..(34): n is a, c, g, or t
  misc_feature (43)..(44): n is a, c, g, or t
  misc_feature (53)..(54): n is a, c, g, or t
tttttttaagcagtggtatcaacgcagagtacnngagatggtnntaaggtggnntttttttttttttttttttttttttttttt

SEQ ID NO: 6500 - DNA, 84 bp, Artificial
  Barcode component
  misc_feature (33)..(34): n is a, c, g, or t
  misc_feature (43)..(44): n is a, c, g, or t
  misc_feature (53)..(54): n is a, c, g, or t
tttttttaagcagtggtatcaacgcagagtacnngagatggtnnggtaagctnntttttttttttttttttttttttttttttt

SEQ ID NO: 6501 - DNA, 84 bp, Artificial
  Barcode component
  misc_feature (33)..(34): n is a, c, g, or t
  misc_feature (43)..(44): n is a, c, g, or t
  misc_feature (53)..(54): n is a, c, g, or t
tttttttaagcagtggtatcaacgcagagtacnngagatggtnntgtgtcganntttttttttttttttttttttttttttttt

SEQ ID NO: 6502 - DNA, 84 bp, Artificial
  Barcode component
  misc_feature (33)..(34): n is a, c, g, or t
  misc_feature (43)..(44): n is a, c, g, or t
  misc_feature (53)..(54): n is a, c, g, or t
tttttttaagcagtggtatcaacgcagagtacnngagatggtnngagcatganntttttttttttttttttttttttttttttt

SEQ ID NO: 6503 - DNA, 84 bp, Artificial
  Barcode component
  misc_feature (33)..(34): n is a, c, g, or t
  misc_feature (43)..(44): n is a, c, g, or t
  misc_feature (53)..(54): n is a, c, g, or t
tttttttaagcagtggtatcaacgcagagtacnngagatggtnntcgaagtcnntttttttttttttttttttttttttttttt

SEQ ID NO: 6504 - DNA, 84 bp, Artificial
  Barcode component
  misc_feature (33)..(34): n is a, c, g, or t
  misc_feature (43)..(44): n is a, c, g, or t
  misc_feature (53)..(54): n is a, c, g, or t
tttttttaagcagtggtatcaacgcagagtacnngagatggtnnggtgaacanntttttttttttttttttttttttttttttt

SEQ ID NO: 6505 - DNA, 84 bp, Artificial
  Barcode component
  misc_feature (33)..(34): n is a, c, g, or t
  misc_feature (43)..(44): n is a, c, g, or t
  misc_feature (53)..(54): n is a, c, g, or t
tttttttaagcagtggtatcaacgcagagtacnngagatggtnnacatgcacnntttttttttttttttttttttttttttttt

SEQ ID NO: 6506 - DNA, 84 bp, Artificial
  Barcode component
  misc_feature (33)..(34): n is a, c, g, or t
  misc_feature (43)..(44): n is a, c, g, or t
  misc_feature (53)..(54): n is a, c, g, or t
tttttttaagcagtggtatcaacgcagagtacnngagatggtnnccaacagtnntttttttttttttttttttttttttttttt

SEQ ID NO: 6507 - DNA, 84 bp, Artificial
  Barcode component
  misc_feature (33)..(34): n is a, c, g, or t
  misc_feature (43)..(44): n is a, c, g, or t
  misc_feature (53)..(54): n is a, c, g, or t
tttttttaagcagtggtatcaacgcagagtacnngagatggtnnagaacagcnntttttttttttttttttttttttttttttt

SEQ ID NO: 6508 - DNA, 84 bp, Artificial
  Barcode component
  misc_feature (33)..(34): n is a, c, g, or t
  misc_feature (43)..(44): n is a, c, g, or t
  misc_feature (53)..(54): n is a, c, g, or t
tttttttaagcagtggtatcaacgcagagtacnngagatggtnngaacacgtnntttttttttttttttttttttttttttttt

SEQ ID NO: 6509 - DNA, 84 bp, Artificial
  Barcode component
  misc_feature (33)..(34): n is a, c, g, or t
  misc_feature (43)..(44): n is a, c, g, or t
  misc_feature (53)..(54): n is a, c, g, or t
tttttttaagcagtggtatcaacgcagagtacnngagatggtnnggtcttcanntttttttttttttttttttttttttttttt

SEQ ID NO: 6510 - DNA, 84 bp, Artificial
  Barcode component
  misc_feature (33)..(34): n is a, c, g, or t
  misc_feature (43)..(44): n is a, c, g, or t
  misc_feature (53)..(54): n is a, c, g, or t
tttttttaagcagtggtatcaacgcagagtacnngagatggtnnaggttcagnntttttttttttttttttttttttttttttt

SEQ ID NO: 6511 - DNA, 84 bp, Artificial
  Barcode component
  misc_feature (33)..(34): n is a, c, g, or t
  misc_feature (43)..(44): n is a, c, g, or t
  misc_feature (53)..(54): n is a, c, g, or t
tttttttaagcagtggtatcaacgcagagtacnngagatggtnnctagagcanntttttttttttttttttttttttttttttt

SEQ ID NO: 6512 - DNA, 84 bp, Artificial
  Barcode component
  misc_feature (33)..(34): n is a, c, g, or t
  misc_feature (43)..(44): n is a, c, g, or t
  misc_feature (53)..(54): n is a, c, g, or t
tttttttaagcagtggtatcaacgcagagtacnngagatggtnncttctagcnntttttttttttttttttttttttttttttt

SEQ ID NO: 6513 - DNA, 84 bp, Artificial
  Barcode component
  misc_feature (33)..(34): n is a, c, g, or t
  misc_feature (43)..(44): n is a, c, g, or t
  misc_feature (53)..(54): n is a, c, g, or t
tttttttaagcagtggtatcaacgcagagtacnngagatggtnngagtaacgnntttttttttttttttttttttttttttttt

SEQ ID NO: 6514 - DNA, 84 bp, Artificial
  Barcode component
  misc_feature (33)..(34): n is a, c, g, or t
  misc_feature (43)..(44): n is a, c, g, or t
  misc_feature (53)..(54): n is a, c, g, or t
tttttttaagcagtggtatcaacgcagagtacnngagatggtnnctaagaggnntttttttttttttttttttttttttttttt

SEQ ID NO: 6515 - DNA, 84 bp, Artificial
  Barcode component
  misc_feature (33)..(34): n is a, c, g, or t
  misc_feature (43)..(44): n is a, c, g, or t
  misc_feature (53)..(54): n is a, c, g, or t
tttttttaagcagtggtatcaacgcagagtacnngagatggtnnacgtgtagnntttttttttttttttttttttttttttttt

SEQ ID NO: 6516 - DNA, 84 bp, Artificial
  Barcode component
  misc_feature (33)..(34): n is a, c, g, or t
  misc_feature (43)..(44): n is a, c, g, or t
  misc_feature (53)..(54): n is a, c, g, or t
tttttttaagcagtggtatcaacgcagagtacnngagatggtnnactacaggnntttttttttttttttttttttttttttttt

SEQ ID NO: 6517 - DNA, 84 bp, Artificial
  Barcode component
  misc_feature (33)..(34): n is a, c, g, or t
  misc_feature (43)..(44): n is a, c, g, or t
  misc_feature (53)..(54): n is a, c, g, or t
tttttttaagcagtggtatcaacgcagagtacnngagatggtnntacaggtcnntttttttttttttttttttttttttttttt

SEQ ID NO: 6518 - DNA, 84 bp, Artificial
  Barcode component
  misc_feature (33)..(34): n is a, c, g, or t
  misc_feature (43)..(44): n is a, c, g, or t
  misc_feature (53)..(54): n is a, c, g, or t
tttttttaagcagtggtatcaacgcagagtacnngagatggtnnctcacatgnntttttttttttttttttttttttttttttt

SEQ ID NO: 6519 - DNA, 84 bp, Artificial
  Barcode component
  misc_feature (33)..(34): n is a, c, g, or t
  misc_feature (43)..(44): n is a, c, g, or t
  misc_feature (53)..(54): n is a, c, g, or t
tttttttaagcagtggtatcaacgcagagtacnngagatggtnnactaggagnntttttttttttttttttttttttttttttt

SEQ ID NO: 6520 - DNA, 84 bp, Artificial
  Barcode component
  misc_feature (33)..(34): n is a, c, g, or t
  misc_feature (43)..(44): n is a, c, g, or t
  misc_feature (53)..(54): n is a, c, g, or t
tttttttaagcagtggtatcaacgcagagtacnngagatggtnnccatagganntttttttttttttttttttttttttttttt

SEQ ID NO: 6521 - DNA, 84 bp, Artificial
  Barcode component
  misc_feature (33)..(34): n is a, c, g, or t
  misc_feature (43)..(44): n is a, c, g, or t
  misc_feature (53)..(54): n is a, c, g, or t
tttttttaagcagtggtatcaacgcagagtacnngagatggtnnggagaatcnntttttttttttttttttttttttttttttt

SEQ ID NO: 6522 - DNA, 84 bp, Artificial
  Barcode component
  misc_feature (33)..(34): n is a, c, g, or t
  misc_feature (43)..(44): n is a, c, g, or t
  misc_feature (53)..(54): n is a, c, g, or t
tttttttaagcagtggtatcaacgcagagtacnngagatggtnngccaagaanntttttttttttttttttttttttttttttt

SEQ ID NO: 6523 - DNA, 84 bp, Artificial
  Barcode component
  misc_feature (33)..(34): n is a, c, g, or t
  misc_feature (43)..(44): n is a, c, g, or t
  misc_feature (53)..(54): n is a, c, g, or t
tttttttaagcagtggtatcaacgcagagtacnngagatggtnnaaggcaagnntttttttttttttttttttttttttttttt

SEQ ID NO: 6524 - DNA, 84 bp, Artificial
  Barcode component
  misc_feature (33)..(34): n is a, c, g, or t
  misc_feature (43)..(44): n is a, c, g, or t
  misc_feature (53)..(54): n is a, c, g, or t
tttttttaagcagtggtatcaacgcagagtacnngagatggtnnaatgtcgcnntttttttttttttttttttttttttttttt

SEQ ID NO: 6525 - DNA, 84 bp, Artificial
  Barcode component
  misc_feature (33)..(34): n is a, c, g, or t
  misc_feature (43)..(44): n is a, c, g, or t
  misc_feature (53)..(54): n is a, c, g, or t
tttttttaagcagtggtatcaacgcagagtacnngagatggtnnatggaaccnntttttttttttttttttttttttttttttt

SEQ ID NO: 6526 - DNA, 84 bp, Artificial
  Barcode component
  misc_feature (33)..(34): n is a, c, g, or t
  misc_feature (43)..(44): n is a, c, g, or t
  misc_feature (53)..(54): n is a, c, g, or t
tttttttaagcagtggtatcaacgcagagtacnngagatggtnnagaggcatnntttttttttttttttttttttttttttttt

SEQ ID NO: 6527 - DNA, 84 bp, Artificial
  Barcode component
  misc_feature (33)..(34): n is a, c, g, or t
  misc_feature (43)..(44): n is a, c, g, or t
  misc_feature (53)..(54): n is a, c, g, or t
tttttttaagcagtggtatcaacgcagagtacnngagatggtnntgcatagcnntttttttttttttttttttttttttttttt

SEQ ID NO: 6528 - DNA, 84 bp, Artificial
  Barcode component
  misc_feature (33)..(34): n is a, c, g, or t
  misc_feature (43)..(44): n is a, c, g, or t
  misc_feature (53)..(54): n is a, c, g, or t
tttttttaagcagtggtatcaacgcagagtacnngagatggtnnctaacgganntttttttttttttttttttttttttttttt

SEQ ID NO: 6529 - DNA, 84 bp, Artificial
  Barcode component
  misc_feature (33)..(34): n is a, c, g, or t
  misc_feature (43)..(44): n is a, c, g, or t
  misc_feature (53)..(54): n is a, c, g, or t
tttttttaagcagtggtatcaacgcagagtacnngagatggtnntatcgaggnntttttttttttttttttttttttttttttt

SEQ ID NO: 6530 - DNA, 84 bp, Artificial
  Barcode component
  misc_feature (33)..(34): n is a, c, g, or t
  misc_feature (43)..(44): n is a, c, g, or t
  misc_feature (53)..(54): n is a, c, g, or t
tttttttaagcagtggtatcaacgcagagtacnngagatggtnncatagcctnntttttttttttttttttttttttttttttt

SEQ ID NO: 6531 - DNA, 84 bp, Artificial
  Barcode component
  misc_feature (33)..(34): n is a, c, g, or t
  misc_feature (43)..(44): n is a, c, g, or t
  misc_feature (53)..(54): n is a, c, g, or t
tttttttaagcagtggtatcaacgcagagtacnngagatggtnnatcgagacnntttttttttttttttttttttttttttttt

SEQ ID NO: 6532 - DNA, 84 bp, Artificial
  Barcode component
  misc_feature (33)..(34): n is a, c, g, or t
  misc_feature (43)..(44): n is a, c, g, or t
  misc_feature (53)..(54): n is a, c, g, or t
tttttttaagcagtggtatcaacgcagagtacnngagatggtnnggaagagtnntttttttttttttttttttttttttttttt

SEQ ID NO: 6533 - DNA, 84 bp, Artificial
  Barcode component
  misc_feature (33)..(34): n is a, c, g, or t
  misc_feature (43)..(44): n is a, c, g, or t
  misc_feature (53)..(54): n is a, c, g, or t
tttttttaagcagtggtatcaacgcagagtacnngagatggtnnccaagtagnntttttttttttttttttttttttttttttt

SEQ ID NO: 6534 - DNA, 84 bp, Artificial
  Barcode component
  misc_feature (33)..(34): n is a, c, g, or t
  misc_feature (43)..(44): n is a, c, g, or t
  misc_feature (53)..(54): n is a, c, g, or t
tttttttaagcagtggtatcaacgcagagtacnngagatggtnnctgaacagnntttttttttttttttttttttttttttttt

SEQ ID NO: 6535 - DNA, 84 bp, Artificial
  Barcode component
  misc_feature (33)..(34): n is a, c, g, or t
  misc_feature (43)..(44): n is a, c, g, or t
  misc_feature (53)..(54): n is a, c, g, or t
tttttttaagcagtggtatcaacgcagagtacnngagatggtnngtaggttcnntttttttttttttttttttttttttttttt

SEQ ID NO: 6536 - DNA, 84 bp, Artificial
  Barcode component
  misc_feature (33)..(34): n is a, c, g, or t
  misc_feature (43)..(44): n is a, c, g, or t
  misc_feature (53)..(54): n is a, c, g, or t
tttttttaagcagtggtatcaacgcagagtacnngagatggtnngtatggacnntttttttttttttttttttttttttttttt

SEQ ID NO: 6537 - DNA, 84 bp, Artificial
  Barcode component
  misc_feature (33)..(34): n is a, c, g, or t
  misc_feature (43)..(44): n is a, c, g, or t
  misc_feature (53)..(54): n is a, c, g, or t
tttttttaagcagtggtatcaacgcagagtacnngagatggtnntcgcaacanntttttttttttttttttttttttttttttt

SEQ ID NO: 6538 - DNA, 84 bp, Artificial
  Barcode component
  misc_feature (33)..(34): n is a, c, g, or t
  misc_feature (43)..(44): n is a, c, g, or t
  misc_feature (53)..(54): n is a, c, g, or t
tttttttaagcagtggtatcaacgcagagtacnngagatggtnnccgctaatnntttttttttttttttttttttttttttttt

SEQ ID NO: 6539 - DNA, 84 bp, Artificial
  Barcode component
  misc_feature (33)..(34): n is a, c, g, or t
  misc_feature (43)..(44): n is a, c, g, or t
  misc_feature (53)..(54): n is a, c, g, or t
tttttttaagcagtggtatcaacgcagagtacnngagatggtnngattcgcanntttttttttttttttttttttttttttttt

SEQ ID NO: 6540 - DNA, 84 bp, Artificial
  Barcode component
  misc_feature (33)..(34): n is a, c, g, or t
  misc_feature (43)..(44): n is a, c, g, or t
  misc_feature (53)..(54): n is a, c, g, or t
tttttttaagcagtggtatcaacgcagagtacnngagatggtnncgatggaanntttttttttttttttttttttttttttttt

SEQ ID NO: 6541 - DNA, 84 bp, Artificial
  Barcode component
  misc_feature (33)..(34): n is a, c, g, or t
  misc_feature (43)..(44): n is a, c, g, or t
  misc_feature (53)..(54): n is a, c, g, or t
tttttttaagcagtggtatcaacgcagagtacnngagatggtnnagcaagganntttttttttttttttttttttttttttttt

SEQ ID NO: 6542 - DNA, 84 bp, Artificial
  Barcode component
  misc_feature (33)..(34): n is a, c, g, or t
  misc_feature (43)..(44): n is a, c, g, or t
  misc_feature (53)..(54): n is a, c, g, or t
tttttttaagcagtggtatcaacgcagagtacnngagatggtnncgtagcaanntttttttttttttttttttttttttttttt

SEQ ID NO: 6543 - DNA, 84 bp, Artificial
  Barcode component
  misc_feature (33)..(34): n is a, c, g, or t
  misc_feature (43)..(44): n is a, c, g, or t
  misc_feature (53)..(54): n is a, c, g, or t
tttttttaagcagtggtatcaacgcagagtacnngagatggtnntggcagtanntttttttttttttttttttttttttttttt

SEQ ID NO: 6544 - DNA, 84 bp, Artificial
  Barcode component
  misc_feature (33)..(34): n is a, c, g, or t
  misc_feature (43)..(44): n is a, c, g, or t
  misc_feature (53)..(54): n is a, c, g, or t
tttttttaagcagtggtatcaacgcagagtacnngagatggtnncggtagttnntttttttttttttttttttttttttttttt

SEQ ID NO: 6545 - DNA, 84 bp, Artificial
  Barcode component
  misc_feature (33)..(34): n is a, c, g, or t
  misc_feature (43)..(44): n is a, c, g, or t
  misc_feature (53)..(54): n is a, c, g, or t
tttttttaagcagtggtatcaacgcagagtacnngagatggtnntgacttcgnntttttttttttttttttttttttttttttt

SEQ ID NO: 6546 - DNA, 84 bp, Artificial
  Barcode component
  misc_feature (33)..(34): n is a, c, g, or t
  misc_feature (43)..(44): n is a, c, g, or t
  misc_feature (53)..(54): n is a, c, g, or t
tttttttaagcagtggtatcaacgcagagtacnngagatggtnngagtgcaanntttttttttttttttttttttttttttttt

SEQ ID NO: 6547 - DNA, 84 bp, Artificial
  Barcode component
  misc_feature (33)..(34): n is a, c, g, or t
  misc_feature (43)..(44): n is a, c, g, or t
  misc_feature (53)..(54): n is a, c, g, or t
tttttttaagcagtggtatcaacgcagagtacnngagatggtnnacggtaacnntttttttttttttttttttttttttttttt

SEQ ID NO: 6548 - DNA, 84 bp, Artificial
  Barcode component
  misc_feature (33)..(34): n is a, c, g, or t
  misc_feature (43)..(44): n is a, c, g, or t
  misc_feature (53)..(54): n is a, c, g, or t
tttttttaagcagtggtatcaacgcagagtacnngagatggtnnaagtggtgnntttttttttttttttttttttttttttttt

SEQ ID NO: 6549 - DNA, 84 bp, Artificial
  Barcode component
  misc_feature (33)..(34): n is a, c, g, or t
  misc_feature (43)..(44): n is a, c, g, or t
  misc_feature (53)..(54): n is a, c, g, or t
tttttttaagcagtggtatcaacgcagagtacnngagatggtnnggagacaanntttttttttttttttttttttttttttttt

SEQ ID NO: 6550 - DNA, 84 bp, Artificial
  Barcode component
  misc_feature (33)..(34): n is a, c, g, or t
  misc_feature (43)..(44): n is a, c, g, or t
  misc_feature (53)..(54): n is a, c, g, or t
tttttttaagcagtggtatcaacgcagagtacnngagatggtnntcaaggacnntttttttttttttttttttttttttttttt

SEQ ID NO: 6551 - DNA, 84 bp, Artificial
  Barcode component
  misc_feature (33)..(34): n is a, c, g, or t
  misc_feature (43)..(44): n is a, c, g, or t
  misc_feature (53)..(54): n is a, c, g, or t
tttttttaagcagtggtatcaacgcagagtacnngagatggtnnaagagagcnntttttttttttttttttttttttttttttt

SEQ ID NO: 6552 - DNA, 84 bp, Artificial
  Barcode component
  misc_feature (33)..(34): n is a, c, g, or t
  misc_feature (43)..(44): n is a, c, g, or t
  misc_feature (53)..(54): n is a, c, g, or t
tttttttaagcagtggtatcaacgcagagtacnngagatggtnncgagagatnntttttttttttttttttttttttttttttt

SEQ ID NO: 6553 - DNA, 84 bp, Artificial
  Barcode component
  misc_feature (33)..(34): n is a, c, g, or t
  misc_feature (43)..(44): n is a, c, g, or t
  misc_feature (53)..(54): n is a, c, g, or t
tttttttaagcagtggtatcaacgcagagtacnngagatggtnnacagatggnntttttttttttttttttttttttttttttt

SEQ ID NO: 6554 - DNA, 84 bp, Artificial
  Barcode component
  misc_feature (33)..(34): n is a, c, g, or t
  misc_feature (43)..(44): n is a, c, g, or t
  misc_feature (53)..(54): n is a, c, g, or t
tttttttaagcagtggtatcaacgcagagtacnngagatggtnnaggagtcanntttttttttttttttttttttttttttttt

SEQ ID NO: 6555 - DNA, 84 bp, Artificial
  Barcode component
  misc_feature (33)..(34): n is a, c, g, or t
  misc_feature (43)..(44): n is a, c, g, or t
  misc_feature (53)..(54): n is a, c, g, or t
tttttttaagcagtggtatcaacgcagagtacnngagatggtnncgtgttacnntttttttttttttttttttttttttttttt

SEQ ID NO: 6556 - DNA, 84 bp, Artificial
  Barcode component
  misc_feature (33)..(34): n is a, c, g, or t
  misc_feature (43)..(44): n is a, c, g, or t
  misc_feature (53)..(54): n is a, c, g, or t
tttttttaagcagtggtatcaacgcagagtacnngagatggtnntagtgtgcnntttttttttttttttttttttttttttttt

SEQ ID NO: 6557 - DNA, 84 bp, Artificial
  Barcode component
  misc_feature (33)..(34): n is a, c, g, or t
  misc_feature (43)..(44): n is a, c, g, or t
  misc_feature (53)..(54): n is a, c, g, or t
tttttttaagcagtggtatcaacgcagagtacnngagatggtnnctcatgacnntttttttttttttttttttttttttttttt

SEQ ID NO: 6558 - DNA, 84 bp, Artificial
  Barcode component
  misc_feature (33)..(34): n is a, c, g, or t
  misc_feature (43)..(44): n is a, c, g, or t
  misc_feature (53)..(54): n is a, c, g, or t
tttttttaagcagtggtatcaacgcagagtacnngagatggtnngtatccagnntttttttttttttttttttttttttttttt

SEQ ID NO: 6559 - DNA, 84 bp, Artificial
  Barcode component
  misc_feature (33)..(34): n is a, c, g, or t
  misc_feature (43)..(44): n is a, c, g, or t
  misc_feature (53)..(54): n is a, c, g, or t
tttttttaagcagtggtatcaacgcagagtacnngagatggtnnacgcctatnntttttttttttttttttttttttttttttt

SEQ ID NO: 6560 - DNA, 84 bp, Artificial
  Barcode component
  misc_feature (33)..(34): n is a, c, g, or t
  misc_feature (43)..(44): n is a, c, g, or t
  misc_feature (53)..(54): n is a, c, g, or t
tttttttaagcagtggtatcaacgcagagtacnngagatggtnnaacgacctnntttttttttttttttttttttttttttttt

SEQ ID NO: 6561 - DNA, 84 bp, Artificial
  Barcode component
  misc_feature (33)..(34): n is a, c, g, or t
  misc_feature (43)..(44): n is a, c, g, or t
  misc_feature (53)..(54): n is a, c, g, or t
tttttttaagcagtggtatcaacgcagagtacnngagatggtnnatcaggctnntttttttttttttttttttttttttttttt

SEQ ID NO: 6562 - DNA, 84 bp, Artificial
  Barcode component
  misc_feature (33)..(34): n is a, c, g, or t
  misc_feature (43)..(44): n is a, c, g, or t
  misc_feature (53)..(54): n is a, c, g, or t
tttttttaagcagtggtatcaacgcagagtacnngagatggtnncaagttcgnntttttttttttttttttttttttttttttt

SEQ ID NO: 6563 - DNA, 84 bp, Artificial
  Barcode component
  misc_feature (33)..(34): n is a, c, g, or t
  misc_feature (43)..(44): n is a, c, g, or t
  misc_feature (53)..(54): n is a, c, g, or t
tttttttaagcagtggtatcaacgcagagtacnngagatggtnntagccaganntttttttttttttttttttttttttttttt

SEQ ID NO: 6564 - DNA, 84 bp, Artificial
  Barcode component
  misc_feature (33)..(34): n is a, c, g, or t
  misc_feature (43)..(44): n is a, c, g, or t
  misc_feature (53)..(54): n is a, c, g, or t
tttttttaagcagtggtatcaacgcagagtacnngagatggtnncaatcacgnntttttttttttttttttttttttttttttt

SEQ ID NO: 6565 - DNA, 84 bp, Artificial
  Barcode component
  misc_feature (33)..(34): n is a, c, g, or t
  misc_feature (43)..(44): n is a, c, g, or t
  misc_feature (53)..(54): n is a, c, g, or t
tttttttaagcagtggtatcaacgcagagtacnngagatggtnngcaacaagnntttttttttttttttttttttttttttttt

SEQ ID NO: 6566 - DNA, 84 bp, Artificial
  Barcode component
  misc_feature (33)..(34): n is a, c, g, or t
  misc_feature (43)..(44): n is a, c, g, or t
  misc_feature (53)..(54): n is a, c, g, or t
tttttttaagcagtggtatcaacgcagagtacnngagatggtnncacgacaanntttttttttttttttttttttttttttttt

SEQ ID NO: 6567 - DNA, 84 bp, Artificial
  Barcode component
  misc_feature (33)..(34): n is a, c, g, or t
  misc_feature (43)..(44): n is a, c, g, or t
  misc_feature (53)..(54): n is a, c, g, or t
tttttttaagcagtggtatcaacgcagagtacnngagatggtnntacggaganntttttttttttttttttttttttttttttt

SEQ ID NO: 6568 - DNA, 84 bp, Artificial
  Barcode component
  misc_feature (33)..(34): n is a, c, g, or t
  misc_feature (43)..(44): n is a, c, g, or t
  misc_feature (53)..(54): n is a, c, g, or t
tttttttaagcagtggtatcaacgcagagtacnngagatggtnncgacaaganntttttttttttttttttttttttttttttt

SEQ ID NO: 6569 - DNA, 84 bp, Artificial
  Barcode component
  misc_feature (33)..(34): n is a, c, g, or t
  misc_feature (43)..(44): n is a, c, g, or t
  misc_feature (53)..(54): n is a, c, g, or t
tttttttaagcagtggtatcaacgcagagtacnngagatggtnncgaagtganntttttttttttttttttttttttttttttt

SEQ ID NO: 6570 - DNA, 84 bp, Artificial
  Barcode component
  misc_feature (33)..(34): n is a, c, g, or t
  misc_feature (43)..(44): n is a, c, g, or t
  misc_feature (53)..(54): n is a, c, g, or t
tttttttaagcagtggtatcaacgcagagtacnngagatggtnnagctggtanntttttttttttttttttttttttttttttt

SEQ ID NO: 6571 - DNA, 84 bp, Artificial
  Barcode component
  misc_feature (33)..(34): n is a, c, g, or t
  misc_feature (43)..(44): n is a, c, g, or t
  misc_feature (53)..(54): n is a, c, g, or t
tttttttaagcagtggtatcaacgcagagtacnngagatggtnnaactaggcnntttttttttttttttttttttttttttttt

SEQ ID NO: 6572 - DNA, 84 bp, Artificial
  Barcode component
  misc_feature (33)..(34): n is a, c, g, or t
  misc_feature (43)..(44): n is a, c, g, or t
  misc_feature (53)..(54): n is a, c, g, or t
tttttttaagcagtggtatcaacgcagagtacnngagatggtnncagcaagtnntttttttttttttttttttttttttttttt

SEQ ID NO: 6573 - DNA, 84 bp, Artificial
  Barcode component
  misc_feature (33)..(34): n is a, c, g, or t
  misc_feature (43)..(44): n is a, c, g, or t
  misc_feature (53)..(54): n is a, c, g, or t
tttttttaagcagtggtatcaacgcagagtacnngagatggtnnacgaggtanntttttttttttttttttttttttttttttt

SEQ ID NO: 6574 - DNA, 84 bp, Artificial
  Barcode component
  misc_feature (33)..(34): n is a, c, g, or t
  misc_feature (43)..(44): n is a, c, g, or t
  misc_feature (53)..(54): n is a, c, g, or t
tttttttaagcagtggtatcaacgcagagtacnngagatggtnncatcttccnntttttttttttttttttttttttttttttt

SEQ ID NO: 6575 - DNA, 84 bp, Artificial
  Barcode component
  misc_feature (33)..(34): n is a, c, g, or t
  misc_feature (43)..(44): n is a, c, g, or t
  misc_feature (53)..(54): n is a, c, g, or t
tttttttaagcagtggtatcaacgcagagtacnngagatggtnncctgaatcnntttttttttttttttttttttttttttttt

SEQ ID NO: 6576 - DNA, 84 bp, Artificial
  Barcode component
  misc_feature (33)..(34): n is a, c, g, or t
  misc_feature (43)..(44): n is a, c, g, or t
  misc_feature (53)..(54): n is a, c, g, or t
tttttttaagcagtggtatcaacgcagagtacnngagatggtnntgcagactnntttttttttttttttttttttttttttttt

SEQ ID NO: 6577 - DNA, 84 bp, Artificial
  Barcode component
  misc_feature (33)..(34): n is a, c, g, or t
  misc_feature (43)..(44): n is a, c, g, or t
  misc_feature (53)..(54): n is a, c, g, or t
tttttttaagcagtggtatcaacgcagagtacnngagatggtnnagatgtggnntttttttttttttttttttttttttttttt

SEQ ID NO: 6578 - DNA, 84 bp, Artificial
  Barcode component
  misc_feature (33)..(34): n is a, c, g, or t
  misc_feature (43)..(44): n is a, c, g, or t
  misc_feature (53)..(54): n is a, c, g, or t
tttttttaagcagtggtatcaacgcagagtacnngagatggtnnagttcgacnntttttttttttttttttttttttttttttt

SEQ ID NO: 6579 - DNA, 84 bp, Artificial
  Barcode component
  misc_feature (33)..(34): n is a, c, g, or t
  misc_feature (43)..(44): n is a, c, g, or t
  misc_feature (53)..(54): n is a, c, g, or t
tttttttaagcagtggtatcaacgcagagtacnngagatggtnnacaacctcnntttttttttttttttttttttttttttttt

SEQ ID NO: 6580 - DNA, 84 bp, Artificial
  Barcode component
  misc_feature (33)..(34): n is a, c, g, or t
  misc_feature (43)..(44): n is a, c, g, or t
  misc_feature (53)..(54): n is a, c, g, or t
tttttttaagcagtggtatcaacgcagagtacnngagatggtnncatggtagnntttttttttttttttttttttttttttttt

SEQ ID NO: 6581 - DNA, 84 bp, Artificial
  Barcode component
  misc_feature (33)..(34): n is a, c, g, or t
  misc_feature (43)..(44): n is a, c, g, or t
  misc_feature (53)..(54): n is a, c, g, or t
tttttttaagcagtggtatcaacgcagagtacnngagatggtnncgtatctcnntttttttttttttttttttttttttttttt

SEQ ID NO: 6582 - DNA, 84 bp, Artificial
  Barcode component
  misc_feature (33)..(34): n is a, c, g, or t
  misc_feature (43)..(44): n is a, c, g, or t
  misc_feature (53)..(54): n is a, c, g, or t
tttttttaagcagtggtatcaacgcagagtacnngagatggtnncctagttcnntttttttttttttttttttttttttttttt

SEQ ID NO: 6583 - DNA, 84 bp, Artificial
  Barcode component
  misc_feature (33)..(34): n is a, c, g, or t
  misc_feature (43)..(44): n is a, c, g, or t
  misc_feature (53)..(54): n is a, c, g, or t
tttttttaagcagtggtatcaacgcagagtacnngagatggtnncaagagtcnntttttttttttttttttttttttttttttt

SEQ ID NO: 6584 - DNA, 84 bp, Artificial
  Barcode component
  misc_feature (33)..(34): n is a, c, g, or t
  misc_feature (43)..(44): n is a, c, g, or t
  misc_feature (53)..(54): n is a, c, g, or t
tttttttaagcagtggtatcaacgcagagtacnngaagtaggnnaatcggcanntttttttttttttttttttttttttttttt

SEQ ID NO: 6585 - DNA, 84 bp, Artificial
  Barcode component
  misc_feature (33)..(34): n is a, c, g, or t
  misc_feature (43)..(44): n is a, c, g, or t
  misc_feature (53)..(54): n is a, c, g, or t
tttttttaagcagtggtatcaacgcagagtacnngaagtaggnntacggcatnntttttttttttttttttttttttttttttt

SEQ ID NO: 6586 - DNA, 84 bp, Artificial
  Barcode component
  misc_feature (33)..(34): n is a, c, g, or t
  misc_feature (43)..(44): n is a, c, g, or t
  misc_feature (53)..(54): n is a, c, g, or t
tttttttaagcagtggtatcaacgcagagtacnngaagtaggnnttggatcgnntttttttttttttttttttttttttttttt

SEQ ID NO: 6587 - DNA, 84 bp, Artificial
  Barcode component
  misc_feature (33)..(34): n is a, c, g, or t
  misc_feature (43)..(44): n is a, c, g, or t
  misc_feature (53)..(54): n is a, c, g, or t
tttttttaagcagtggtatcaacgcagagtacnngaagtaggnntggaacganntttttttttttttttttttttttttttttt

SEQ ID NO: 6588 - DNA, 84 bp, Artificial
  Barcode component
  misc_feature (33)..(34): n is a, c, g, or t
  misc_feature (43)..(44): n is a, c, g, or t
  misc_feature (53)..(54): n is a, c, g, or t
tttttttaagcagtggtatcaacgcagagtacnngaagtaggnnggcaatcanntttttttttttttttttttttttttttttt

SEQ ID NO: 6589 - DNA, 84 bp, Artificial
  Barcode component
  misc_feature (33)..(34): n is a, c, g, or t
  misc_feature (43)..(44): n is a, c, g, or t
  misc_feature (53)..(54): n is a, c, g, or t
tttttttaagcagtggtatcaacgcagagtacnngaagtaggnngaatccganntttttttttttttttttttttttttttttt

SEQ ID NO: 6590 - DNA, 84 bp, Artificial
  Barcode component
  misc_feature (33)..(34): n is a, c, g, or t
  misc_feature (43)..(44): n is a, c, g, or t
  misc_feature (53)..(54): n is a, c, g, or t
tttttttaagcagtggtatcaacgcagagtacnngaagtaggnnttacggtgnntttttttttttttttttttttttttttttt

SEQ ID NO: 6591 - DNA, 84 bp, Artificial
  Barcode component
  misc_feature (33)..(34): n is a, c, g, or t
  misc_feature (43)..(44): n is a, c, g, or t
  misc_feature (53)..(54): n is a, c, g, or t
tttttttaagcagtggtatcaacgcagagtacnngaagtaggnncatatcggnntttttttttttttttttttttttttttttt

SEQ ID NO: 6592 - DNA, 84 bp, Artificial
  Barcode component
  misc_feature (33)..(34): n is a, c, g, or t
  misc_feature (43)..(44): n is a, c, g, or t
  misc_feature (53)..(54): n is a, c, g, or t
tttttttaagcagtggtatcaacgcagagtacnngaagtaggnncttcggtanntttttttttttttttttttttttttttttt

SEQ ID NO: 6593 - DNA, 84 bp, Artificial
  Barcode component
  misc_feature (33)..(34): n is a, c, g, or t
  misc_feature (43)..(44): n is a, c, g, or t
  misc_feature (53)..(54): n is a, c, g, or t
tttttttaagcagtggtatcaacgcagagtacnngaagtaggnntcctaacgnntttttttttttttttttttttttttttttt

SEQ ID NO: 6594 - DNA, 84 bp, Artificial
  Barcode component
  misc_feature (33)..(34): n is a, c, g, or t
  misc_feature (43)..(44): n is a, c, g, or t
  misc_feature (53)..(54): n is a, c, g, or t
tttttttaagcagtggtatcaacgcagagtacnngaagtaggnngtaagccanntttttttttttttttttttttttttttttt

SEQ ID NO: 6595 - DNA, 84 bp, Artificial
  Barcode component
  misc_feature (33)..(34): n is a, c, g, or t
  misc_feature (43)..(44): n is a, c, g, or t
  misc_feature (53)..(54): n is a, c, g, or t
tttttttaagcagtggtatcaacgcagagtacnngaagtaggnntaaggtggnntttttttttttttttttttttttttttttt

SEQ ID NO: 6596 - DNA, 84 bp, Artificial
  Barcode component
  misc_feature (33)..(34): n is a, c, g, or t
  misc_feature (43)..(44): n is a, c, g, or t
  misc_feature (53)..(54): n is a, c, g, or t
tttttttaagcagtggtatcaacgcagagtacnngaagtaggnnggtaagctnntttttttttttttttttttttttttttttt

SEQ ID NO: 6597 - DNA, 84 bp, Artificial
  Barcode component
  misc_feature (33)..(34): n is a, c, g, or t
  misc_feature (43)..(44): n is a, c, g, or t
  misc_feature (53)..(54): n is a, c, g, or t
tttttttaagcagtggtatcaacgcagagtacnngaagtaggnntgtgtcganntttttttttttttttttttttttttttttt

SEQ ID NO: 6598 - DNA, 84 bp, Artificial
  Barcode component
  misc_feature (33)..(34): n is a, c, g, or t
  misc_feature (43)..(44): n is a, c, g, or t
  misc_feature (53)..(54): n is a, c, g, or t
tttttttaagcagtggtatcaacgcagagtacnngaagtaggnngagcatganntttttttttttttttttttttttttttttt

SEQ ID NO: 6599 - DNA, 84 bp, Artificial
  Barcode component
  misc_feature (33)..(34): n is a, c, g, or t
  misc_feature (43)..(44): n is a, c, g, or t
  misc_feature (53)..(54): n is a, c, g, or t
tttttttaagcagtggtatcaacgcagagtacnngaagtaggnntcgaagtcnntttttttttttttttttttttttttttttt

SEQ ID NO: 6600 - DNA, 84 bp, Artificial
  Barcode component
  misc_feature (33)..(34): n is a, c, g, or t
  misc_feature (43)..(44): n is a, c, g, or t
  misc_feature (53)..(54): n is a, c, g, or t
tttttttaagcagtggtatcaacgcagagtacnngaagtaggnnggtgaacanntttttttttttttttttttttttttttttt

SEQ ID NO: 6601 - DNA, 84 bp, Artificial
  Barcode component
  misc_feature (33)..(34): n is a, c, g, or t
  misc_feature (43)..(44): n is a, c, g, or t
  misc_feature (53)..(54): n is a, c, g, or t
tttttttaagcagtggtatcaacgcagagtacnngaagtaggnnacatgcacnntttttttttttttttttttttttttttttt

SEQ ID NO: 6602 - DNA, 84 bp, Artificial
  Barcode component
  misc_feature (33)..(34): n is a, c, g, or t
  misc_feature (43)..(44): n is a, c, g, or t
  misc_feature (53)..(54): n is a, c, g, or t
tttttttaagcagtggtatcaacgcagagtacnngaagtaggnnccaacagtnntttttttttttttttttttttttttttttt

SEQ ID NO: 6603 - DNA, 84 bp, Artificial
  Barcode component
  misc_feature (33)..(34): n is a, c, g, or t
  misc_feature (43)..(44): n is a, c, g, or t
  misc_feature (53)..(54): n is a, c, g, or t
tttttttaagcagtggtatcaacgcagagtacnngaagtaggnnagaacagcnntttttttttttttttttttttttttttttt

SEQ ID NO: 6604 - DNA, 84 bp, Artificial
  Barcode component
  misc_feature (33)..(34): n is a, c, g, or t
  misc_feature (43)..(44): n is a, c, g, or t
  misc_feature (53)..(54): n is a, c, g, or t
tttttttaagcagtggtatcaacgcagagtacnngaagtaggnngaacacgtnntttttttttttttttttttttttttttttt

SEQ ID NO: 6605 - DNA, 84 bp, Artificial
  Barcode component
  misc_feature (33)..(34): n is a, c, g, or t
  misc_feature (43)..(44): n is a, c, g, or t
  misc_feature (53)..(54): n is a, c, g, or t
tttttttaagcagtggtatcaacgcagagtacnngaagtaggnnggtcttcanntttttttttttttttttttttttttttttt

SEQ ID NO: 6606 - DNA, 84 bp, Artificial
  Barcode component
  misc_feature (33)..(34): n is a, c, g, or t
  misc_feature (43)..(44): n is a, c, g, or t
  misc_feature (53)..(54): n is a, c, g, or t
tttttttaagcagtggtatcaacgcagagtacnngaagtaggnnaggttcagnntttttttttttttttttttttttttttttt

SEQ ID NO: 6607 - DNA, 84 bp, Artificial
  Barcode component
  misc_feature (33)..(34): n is a, c, g, or t
  misc_feature (43)..(44): n is a, c, g, or t
  misc_feature (53)..(54): n is a, c, g, or t
tttttttaagcagtggtatcaacgcagagtacnngaagtaggnnctagagcanntttttttttttttttttttttttttttttt

SEQ ID NO: 6608 - DNA, 84 bp, Artificial
  Barcode component
  misc_feature (33)..(34): n is a, c, g, or t
  misc_feature (43)..(44): n is a, c, g, or t
  misc_feature (53)..(54): n is a, c, g, or t
tttttttaagcagtggtatcaacgcagagtacnngaagtaggnncttctagcnntttttttttttttttttttttttttttttt

SEQ ID NO: 6609 - DNA, 84 bp, Artificial
  Barcode component
  misc_feature (33)..(34): n is a, c, g, or t
  misc_feature (43)..(44): n is a, c, g, or t
  misc_feature (53)..(54): n is a, c, g, or t
tttttttaagcagtggtatcaacgcagagtacnngaagtaggnngagtaacgnntttttttttttttttttttttttttttttt

SEQ ID NO: 6610 - DNA, 84 bp, Artificial
  Barcode component
  misc_feature (33)..(34): n is a, c, g, or t
  misc_feature (43)..(44): n is a, c, g, or t
  misc_feature (53)..(54): n is a, c, g, or t
tttttttaagcagtggtatcaacgcagagtacnngaagtaggnnctaagaggnntttttttttttttttttttttttttttttt

SEQ ID NO: 6611 - DNA, 84 bp, Artificial
  Barcode component
  misc_feature (33)..(34): n is a, c, g, or t
  misc_feature (43)..(44): n is a, c, g, or t
  misc_feature (53)..(54): n is a, c, g, or t
tttttttaagcagtggtatcaacgcagagtacnngaagtaggnnacgtgtagnntttttttttttttttttttttttttttttt

SEQ ID NO: 6612 - DNA, 84 bp, Artificial
  Barcode component
  misc_feature (33)..(34): n is a, c, g, or t
  misc_feature (43)..(44): n is a, c, g, or t
  misc_feature (53)..(54): n is a, c, g, or t
tttttttaagcagtggtatcaacgcagagtacnngaagtaggnnactacaggnntttttttttttttttttttttttttttttt

SEQ ID NO: 6613 - DNA, 84 bp, Artificial
  Barcode component
  misc_feature (33)..(34): n is a, c, g, or t
  misc_feature (43)..(44): n is a, c, g, or t
  misc_feature (53)..(54): n is a, c, g, or t
tttttttaagcagtggtatcaacgcagagtacnngaagtaggnntacaggtcnntttttttttttttttttttttttttttttt

SEQ ID NO: 6614 - DNA, 84 bp, Artificial
  Barcode component
  misc_feature (33)..(34): n is a, c, g, or t
  misc_feature (43)..(44): n is a, c, g, or t
  misc_feature (53)..(54): n is a, c, g, or t
tttttttaagcagtggtatcaacgcagagtacnngaagtaggnnctcacatgnntttttttttttttttttttttttttttttt

SEQ ID NO: 6615 - DNA, 84 bp, Artificial
  Barcode component
  misc_feature (33)..(34): n is a, c, g, or t
  misc_feature (43)..(44): n is a, c, g, or t
  misc_feature (53)..(54): n is a, c, g, or t
tttttttaagcagtggtatcaacgcagagtacnngaagtaggnnactaggagnntttttttttttttttttttttttttttttt

SEQ ID NO: 6616 - DNA, 84 bp, Artificial
  Barcode component
  misc_feature (33)..(34): n is a, c, g, or t
  misc_feature (43)..(44): n is a, c, g, or t
  misc_feature (53)..(54): n is a, c, g, or t
tttttttaagcagtggtatcaacgcagagtacnngaagtaggnnccatagganntttttttttttttttttttttttttttttt

SEQ ID NO: 6617 - DNA, 84 bp, Artificial
  Barcode component
  misc_feature (33)..(34): n is a, c, g, or t
  misc_feature (43)..(44): n is a, c, g, or t
  misc_feature (53)..(54): n is a, c, g, or t
tttttttaagcagtggtatcaacgcagagtacnngaagtaggnnggagaatcnntttttttttttttttttttttttttttttt

SEQ ID NO: 6618 - DNA, 84 bp, Artificial
  Barcode component
  misc_feature (33)..(34): n is a, c, g, or t
  misc_feature (43)..(44): n is a, c, g, or t
  misc_feature (53)..(54): n is a, c, g, or t
tttttttaagcagtggtatcaacgcagagtacnngaagtaggnngccaagaanntttttttttttttttttttttttttttttt

SEQ ID NO: 6619 - DNA, 84 bp, Artificial
  Barcode component
  misc_feature (33)..(34): n is a, c, g, or t
  misc_feature (43)..(44): n is a, c, g, or t
  misc_feature (53)..(54): n is a, c, g, or t
tttttttaagcagtggtatcaacgcagagtacnngaagtaggnnaaggcaagnntttttttttttttttttttttttttttttt

SEQ ID NO: 6620 - DNA, 84 bp, Artificial
  Barcode component
  misc_feature (33)..(34): n is a, c, g, or t
  misc_feature (43)..(44): n is a, c, g, or t
  misc_feature (53)..(54): n is a, c, g, or t
tttttttaagcagtggtatcaacgcagagtacnngaagtaggnnaatgtcgcnntttttttttttttttttttttttttttttt

SEQ ID NO: 6621 - DNA, 84 bp, Artificial
  Barcode component
  misc_feature (33)..(34): n is a, c, g, or t
  misc_feature (43)..(44): n is a, c, g, or t
  misc_feature (53)..(54): n is a, c, g, or t
tttttttaagcagtggtatcaacgcagagtacnngaagtaggnnatggaaccnntttttttttttttttttttttttttttttt

SEQ ID NO: 6622 - DNA, 84 bp, Artificial
  Barcode component
  misc_feature (33)..(34): n is a, c, g, or t
  misc_feature (43)..(44): n is a, c, g, or t
  misc_feature (53)..(54): n is a, c, g, or t
tttttttaagcagtggtatcaacgcagagtacnngaagtaggnnagaggcatnntttttttttttttttttttttttttttttt

SEQ ID NO: 6623 - DNA, 84 bp, Artificial
  Barcode component
  misc_feature (33)..(34): n is a, c, g, or t
  misc_feature (43)..(44): n is a, c, g, or t
  misc_feature (53)..(54): n is a, c, g, or t
tttttttaagcagtggtatcaacgcagagtacnngaagtaggnntgcatagcnntttttttttttttttttttttttttttttt

SEQ ID NO: 6624 - DNA, 84 bp, Artificial
  Barcode component
  misc_feature (33)..(34): n is a, c, g, or t
  misc_feature (43)..(44): n is a, c, g, or t
  misc_feature (53)..(54): n is a, c, g, or t
tttttttaagcagtggtatcaacgcagagtacnngaagtaggnnctaacgganntttttttttttttttttttttttttttttt

SEQ ID NO: 6625 - DNA, 84 bp, Artificial
  Barcode component
  misc_feature (33)..(34): n is a, c, g, or t
  misc_feature (43)..(44): n is a, c, g, or t
  misc_feature (53)..(54): n is a, c, g, or t
tttttttaagcagtggtatcaacgcagagtacnngaagtaggnntatcgaggnntttttttttttttttttttttttttttttt

SEQ ID NO: 6626 - DNA, 84 bp, Artificial
  Barcode component
  misc_feature (33)..(34): n is a, c, g, or t
  misc_feature (43)..(44): n is a, c, g, or t
  misc_feature (53)..(54): n is a, c, g, or t
tttttttaagcagtggtatcaacgcagagtacnngaagtaggnncatagcctnntttttttttttttttttttttttttttttt

SEQ ID NO: 6627 - DNA, 84 bp, Artificial
  Barcode component
  misc_feature (33)..(34): n is a, c, g, or t
  misc_feature (43)..(44): n is a, c, g, or t
  misc_feature (53)..(54): n is a, c, g, or t
tttttttaagcagtggtatcaacgcagagtacnngaagtaggnnatcgagacnntttttttttttttttttttttttttttttt

SEQ ID NO: 6628 - DNA, 84 bp, Artificial
  Barcode component
  misc_feature (33)..(34): n is a, c, g, or t
  misc_feature (43)..(44): n is a, c, g, or t
  misc_feature (53)..(54): n is a, c, g, or t
tttttttaagcagtggtatcaacgcagagtacnngaagtaggnnggaagagtnntttttttttttttttttttttttttttttt

SEQ ID NO: 6629 - DNA, 84 bp, Artificial
  Barcode component
  misc_feature (33)..(34): n is a, c, g, or t
  misc_feature (43)..(44): n is a, c, g, or t
  misc_feature (53)..(54): n is a, c, g, or t
tttttttaagcagtggtatcaacgcagagtacnngaagtaggnnccaagtagnntttttttttttttttttttttttttttttt

SEQ ID NO: 6630 - DNA, 84 bp, Artificial
  Barcode component
  misc_feature (33)..(34): n is a, c, g, or t
  misc_feature (43)..(44): n is a, c, g, or t
  misc_feature (53)..(54): n is a, c, g, or t
tttttttaagcagtggtatcaacgcagagtacnngaagtaggnnctgaacagnntttttttttttttttttttttttttttttt

SEQ ID NO: 6631 - DNA, 84 bp, Artificial
  Barcode component
  misc_feature (33)..(34): n is a, c, g, or t
  misc_feature (43)..(44): n is a, c, g, or t
  misc_feature (53)..(54): n is a, c, g, or t
tttttttaagcagtggtatcaacgcagagtacnngaagtaggnngtaggttcnntttttttttttttttttttttttttttttt

SEQ ID NO: 6632 - DNA, 84 bp, Artificial
  Barcode component
  misc_feature (33)..(34): n is a, c, g, or t
  misc_feature (43)..(44): n is a, c, g, or t
  misc_feature (53)..(54): n is a, c, g, or t
tttttttaagcagtggtatcaacgcagagtacnngaagtaggnngtatggacnntttttttttttttttttttttttttttttt

SEQ ID NO: 6633 - DNA, 84 bp, Artificial
  Barcode component
  misc_feature (33)..(34): n is a, c, g, or t
  misc_feature (43)..(44): n is a, c, g, or t
  misc_feature (53)..(54): n is a, c, g, or t
tttttttaagcagtggtatcaacgcagagtacnngaagtaggnntcgcaacanntttttttttttttttttttttttttttttt

SEQ ID NO: 6634 - DNA, 84 bp, Artificial
  Barcode component
  misc_feature (33)..(34): n is a, c, g, or t
  misc_feature (43)..(44): n is a, c, g, or t
  misc_feature (53)..(54): n is a, c, g, or t
tttttttaagcagtggtatcaacgcagagtacnngaagtaggnnccgctaatnntttttttttttttttttttttttttttttt

SEQ ID NO: 6635 - DNA, 84 bp, Artificial
  Barcode component
  misc_feature (33)..(34): n is a, c, g, or t
  misc_feature (43)..(44): n is a, c, g, or t
  misc_feature (53)..(54): n is a, c, g, or t
tttttttaagcagtggtatcaacgcagagtacnngaagtaggnngattcgcanntttttttttttttttttttttttttttttt

SEQ ID NO: 6636 - DNA, 84 bp, Artificial
  Barcode component
  misc_feature (33)..(34): n is a, c, g, or t
  misc_feature (43)..(44): n is a, c, g, or t
  misc_feature (53)..(54): n is a, c, g, or t
tttttttaagcagtggtatcaacgcagagtacnngaagtaggnncgatggaanntttttttttttttttttttttttttttttt

SEQ ID NO: 6637 - DNA, 84 bp, Artificial
  Barcode component
  misc_feature (33)..(34): n is a, c, g, or t
  misc_feature (43)..(44): n is a, c, g, or t
  misc_feature (53)..(54): n is a, c, g, or t
tttttttaagcagtggtatcaacgcagagtacnngaagtaggnnagcaagganntttttttttttttttttttttttttttttt

SEQ ID NO: 6638 - DNA, 84 bp, Artificial
  Barcode component
  misc_feature (33)..(34): n is a, c, g, or t
  misc_feature (43)..(44): n is a, c, g, or t
  misc_feature (53)..(54): n is a, c, g, or t
tttttttaagcagtggtatcaacgcagagtacnngaagtaggnncgtagcaanntttttttttttttttttttttttttttttt

SEQ ID NO: 6639 - DNA, 84 bp, Artificial
  Barcode component
  misc_feature (33)..(34): n is a, c, g, or t
  misc_feature (43)..(44): n is a, c, g, or t
  misc_feature (53)..(54): n is a, c, g, or t
tttttttaagcagtggtatcaacgcagagtacnngaagtaggnntggcagtanntttttttttttttttttttttttttttttt

SEQ ID NO: 6640 - DNA, 84 bp, Artificial
  Barcode component
  misc_feature (33)..(34): n is a, c, g, or t
  misc_feature (43)..(44): n is a, c, g, or t
  misc_feature (53)..(54): n is a, c, g, or t
tttttttaagcagtggtatcaacgcagagtacnngaagtaggnncggtagttnntttttttttttttttttttttttttttttt

SEQ ID NO: 6641 - DNA, 84 bp, Artificial
  Barcode component
  misc_feature (33)..(34): n is a, c, g, or t
  misc_feature (43)..(44): n is a, c, g, or t
  misc_feature (53)..(54): n is a, c, g, or t
tttttttaagcagtggtatcaacgcagagtacnngaagtaggnntgacttcgnntttttttttttttttttttttttttttttt

SEQ ID NO: 6642 - DNA, 84 bp, Artificial
  Barcode component
  misc_feature (33)..(34): n is a, c, g, or t
  misc_feature (43)..(44): n is a, c, g, or t
  misc_feature (53)..(54): n is a, c, g, or t
tttttttaagcagtggtatcaacgcagagtacnngaagtaggnngagtgcaanntttttttttttttttttttttttttttttt

SEQ ID NO: 6643 - DNA, 84 bp, Artificial
  Barcode component
  misc_feature (33)..(34): n is a, c, g, or t
  misc_feature (43)..(44): n is a, c, g, or t
  misc_feature (53)..(54): n is a, c, g, or t
tttttttaagcagtggtatcaacgcagagtacnngaagtaggnnacggtaacnntttttttttttttttttttttttttttttt

SEQ ID NO: 6644 - DNA, 84 bp, Artificial
  Barcode component
  misc_feature (33)..(34): n is a, c, g, or t
  misc_feature (43)..(44): n is a, c, g, or t
  misc_feature (53)..(54): n is a, c, g, or t
tttttttaagcagtggtatcaacgcagagtacnngaagtaggnnaagtggtgnntttttttttttttttttttttttttttttt

SEQ ID NO: 6645 - DNA, 84 bp, Artificial
  Barcode component
  misc_feature (33)..(34): n is a, c, g, or t
  misc_feature (43)..(44): n is a, c, g, or t
  misc_feature (53)..(54): n is a, c, g, or t
tttttttaagcagtggtatcaacgcagagtacnngaagtaggnnggagacaanntttttttttttttttttttttttttttttt

SEQ ID NO: 6646 - DNA, 84 bp, Artificial
  Barcode component
  misc_feature (33)..(34): n is a, c, g, or t
  misc_feature (43)..(44): n is a, c, g, or t
  misc_feature (53)..(54): n is a, c, g, or t
tttttttaagcagtggtatcaacgcagagtacnngaagtaggnntcaaggacnntttttttttttttttttttttttttttttt

SEQ ID NO: 6647 - DNA, 84 bp, Artificial
  Barcode component
  misc_feature (33)..(34): n is a, c, g, or t
  misc_feature (43)..(44): n is a, c, g, or t
  misc_feature (53)..(54): n is a, c, g, or t
tttttttaagcagtggtatcaacgcagagtacnngaagtaggnnaagagagcnntttttttttttttttttttttttttttttt

SEQ ID NO: 6648 - DNA, 84 bp, Artificial
  Barcode component
  misc_feature (33)..(34): n is a, c, g, or t
  misc_feature (43)..(44): n is a, c, g, or t
  misc_feature (53)..(54): n is a, c, g, or t
tttttttaagcagtggtatcaacgcagagtacnngaagtaggnncgagagatnntttttttttttttttttttttttttttttt

SEQ ID NO: 6649 - DNA, 84 bp, Artificial
  Barcode component
  misc_feature (33)..(34): n is a, c, g, or t
  misc_feature (43)..(44): n is a, c, g, or t
  misc_feature (53)..(54): n is a, c, g, or t
tttttttaagcagtggtatcaacgcagagtacnngaagtaggnnacagatggnntttttttttttttttttttttttttttttt

SEQ ID NO: 6650 - DNA, 84 bp, Artificial
  Barcode component
  misc_feature (33)..(34): n is a, c, g, or t
  misc_feature (43)..(44): n is a, c, g, or t
  misc_feature (53)..(54): n is a, c, g, or t
tttttttaagcagtggtatcaacgcagagtacnngaagtaggnnaggagtcanntttttttttttttttttttttttttttttt

SEQ ID NO: 6651 - DNA, 84 bp, Artificial
  Barcode component
  misc_feature (33)..(34): n is a, c, g, or t
  misc_feature (43)..(44): n is a, c, g, or t
  misc_feature (53)..(54): n is a, c, g, or t
tttttttaagcagtggtatcaacgcagagtacnngaagtaggnncgtgttacnntttttttttttttttttttttttttttttt

SEQ ID NO: 6652 - DNA, 84 bp, Artificial
  Barcode component
  misc_feature (33)..(34): n is a, c, g, or t
  misc_feature (43)..(44): n is a, c, g, or t
  misc_feature (53)..(54): n is a, c, g, or t
tttttttaagcagtggtatcaacgcagagtacnngaagtaggnntagtgtgcnntttttttttttttttttttttttttttttt

SEQ ID NO: 6653 - DNA, 84 bp, Artificial
  Barcode component
  misc_feature (33)..(34): n is a, c, g, or t
  misc_feature (43)..(44): n is a, c, g, or t
  misc_feature (53)..(54): n is a, c, g, or t
tttttttaagcagtggtatcaacgcagagtacnngaagtaggnnctcatgacnntttttttttttttttttttttttttttttt

SEQ ID NO: 6654 - DNA, 84 bp, Artificial
  Barcode component
  misc_feature (33)..(34): n is a, c, g, or t
  misc_feature (43)..(44): n is a, c, g, or t
  misc_feature (53)..(54): n is a, c, g, or t
tttttttaagcagtggtatcaacgcagagtacnngaagtaggnngtatccagnntttttttttttttttttttttttttttttt

SEQ ID NO: 6655 - DNA, 84 bp, Artificial
  Barcode component
  misc_feature (33)..(34): n is a, c, g, or t
  misc_feature (43)..(44): n is a, c, g, or t
  misc_feature (53)..(54): n is a, c, g, or t
tttttttaagcagtggtatcaacgcagagtacnngaagtaggnnacgcctatnntttttttttttttttttttttttttttttt

SEQ ID NO: 6656 - DNA, 84 bp, Artificial
  Barcode component
  misc_feature (33)..(34): n is a, c, g, or t
  misc_feature (43)..(44): n is a, c, g, or t
  misc_feature (53)..(54): n is a, c, g, or t
tttttttaagcagtggtatcaacgcagagtacnngaagtaggnnaacgacctnntttttttttttttttttttttttttttttt

SEQ ID NO: 6657 - DNA, 84 bp, Artificial
  Barcode component
  misc_feature (33)..(34): n is a, c, g, or t
  misc_feature (43)..(44): n is a, c, g, or t
  misc_feature (53)..(54): n is a, c, g, or t
tttttttaagcagtggtatcaacgcagagtacnngaagtaggnnatcaggctnntttttttttttttttttttttttttttttt

SEQ ID NO: 6658 - DNA, 84 bp, Artificial
  Barcode component
  misc_feature (33)..(34): n is a, c, g, or t
  misc_feature (43)..(44): n is a, c, g, or t
  misc_feature (53)..(54): n is a, c, g, or t
tttttttaagcagtggtatcaacgcagagtacnngaagtaggnncaagttcgnntttttttttttttttttttttttttttttt

SEQ ID NO: 6659 - DNA, 84 bp, Artificial
  Barcode component
  misc_feature (33)..(34): n is a, c, g, or t
  misc_feature (43)..(44): n is a, c, g, or t
  misc_feature (53)..(54): n is a, c, g, or t
tttttttaagcagtggtatcaacgcagagtacnngaagtaggnntagccaganntttttttttttttttttttttttttttttt

SEQ ID NO: 6660 - DNA, 84 bp, Artificial
  Barcode component
  misc_feature (33)..(34): n is a, c, g, or t
  misc_feature (43)..(44): n is a, c, g, or t
  misc_feature (53)..(54): n is a, c, g, or t
tttttttaagcagtggtatcaacgcagagtacnngaagtaggnncaatcacgnntttttttttttttttttttttttttttttt

SEQ ID NO: 6661 - DNA, 84 bp, Artificial
  Barcode component
  misc_feature (33)..(34): n is a, c, g, or t
  misc_feature (43)..(44): n is a, c, g, or t
  misc_feature (53)..(54): n is a, c, g, or t
tttttttaagcagtggtatcaacgcagagtacnngaagtaggnngcaacaagnntttttttttttttttttttttttttttttt

SEQ ID NO: 6662 - DNA, 84 bp, Artificial
  Barcode component
  misc_feature (33)..(34): n is a, c, g, or t
  misc_feature (43)..(44): n is a, c, g, or t
  misc_feature (53)..(54): n is a, c, g, or t
tttttttaagcagtggtatcaacgcagagtacnngaagtaggnncacgacaanntttttttttttttttttttttttttttttt

SEQ ID NO: 6663 - DNA, 84 bp, Artificial
  Barcode component
  misc_feature (33)..(34): n is a, c, g, or t
  misc_feature (43)..(44): n is a, c, g, or t
  misc_feature (53)..(54): n is a, c, g, or t
tttttttaagcagtggtatcaacgcagagtacnngaagtaggnntacggaganntttttttttttttttttttttttttttttt

SEQ ID NO: 6664 - DNA, 84 bp, Artificial
  Barcode component
  misc_feature (33)..(34): n is a, c, g, or t
  misc_feature (43)..(44): n is a, c, g, or t
  misc_feature (53)..(54): n is a, c, g, or t
tttttttaagcagtggtatcaacgcagagtacnngaagtaggnncgacaaganntttttttttttttttttttttttttttttt

SEQ ID NO: 6665 - DNA, 84 bp, Artificial
  Barcode component
  misc_feature (33)..(34): n is a, c, g, or t
  misc_feature (43)..(44): n is a, c, g, or t
  misc_feature (53)..(54): n is a, c, g, or t
tttttttaagcagtggtatcaacgcagagtacnngaagtaggnncgaagtganntttttttttttttttttttttttttttttt

SEQ ID NO: 6666 - DNA, 84 bp, Artificial
  Barcode component
  misc_feature (33)..(34): n is a, c, g, or t
  misc_feature (43)..(44): n is a, c, g, or t
  misc_feature (53)..(54): n is a, c, g, or t
tttttttaagcagtggtatcaacgcagagtacnngaagtaggnnagctggtanntttttttttttttttttttttttttttttt

SEQ ID NO: 6667 - DNA, 84 bp, Artificial
  Barcode component
  misc_feature (33)..(34): n is a, c, g, or t
  misc_feature (43)..(44): n is a, c, g, or t
  misc_feature (53)..(54): n is a, c, g, or t
tttttttaagcagtggtatcaacgcagagtacnngaagtaggnnaactaggcnntttttttttttttttttttttttttttttt

SEQ ID NO: 6668 - DNA, 84 bp, Artificial
  Barcode component
  misc_feature (33)..(34): n is a, c, g, or t
  misc_feature (43)..(44): n is a, c, g, or t
  misc_feature (53)..(54): n is a, c, g, or t
tttttttaagcagtggtatcaacgcagagtacnngaagtaggnncagcaagtnntttttttttttttttttttttttttttttt

SEQ ID NO: 6669 - DNA, 84 bp, Artificial
  Barcode component
  misc_feature (33)..(34): n is a, c, g, or t
  misc_feature (43)..(44): n is a, c, g, or t
  misc_feature (53)..(54): n is a, c, g, or t
tttttttaagcagtggtatcaacgcagagtacnngaagtaggnnacgaggtanntttttttttttttttttttttttttttttt

SEQ ID NO: 6670 - DNA, 84 bp, Artificial
  Barcode component
  misc_feature (33)..(34): n is a, c, g, or t
  misc_feature (43)..(44): n is a, c, g, or t
  misc_feature (53)..(54): n is a, c, g, or t
tttttttaagcagtggtatcaacgcagagtacnngaagtaggnncatcttccnntttttttttttttttttttttttttttttt

SEQ ID NO: 6671 - DNA, 84 bp, Artificial
  Barcode component
  misc_feature (33)..(34): n is a, c, g, or t
  misc_feature (43)..(44): n is a, c, g, or t
  misc_feature (53)..(54): n is a, c, g, or t
tttttttaagcagtggtatcaacgcagagtacnngaagtaggnncctgaatcnntttttttttttttttttttttttttttttt

SEQ ID NO: 6672 - DNA, 84 bp, Artificial
  Barcode component
  misc_feature (33)..(34): n is a, c, g, or t
  misc_feature (43)..(44): n is a, c, g, or t
  misc_feature (53)..(54): n is a, c, g, or t
tttttttaagcagtggtatcaacgcagagtacnngaagtaggnntgcagactnntttttttttttttttttttttttttttttt

SEQ ID NO: 6673 - DNA, 84 bp, Artificial
  Barcode component
  misc_feature (33)..(34): n is a, c, g, or t
  misc_feature (43)..(44): n is a, c, g, or t
  misc_feature (53)..(54): n is a, c, g, or t
tttttttaagcagtggtatcaacgcagagtacnngaagtaggnnagatgtggnntttttttttttttttttttttttttttttt

SEQ ID NO: 6674 - DNA, 84 bp, Artificial
  Barcode component
  misc_feature (33)..(34): n is a, c, g, or t
  misc_feature (43)..(44): n is a, c, g, or t
  misc_feature (53)..(54): n is a, c, g, or t
tttttttaagcagtggtatcaacgcagagtacnngaagtaggnnagttcgacnntttttttttttttttttttttttttttttt

SEQ ID NO: 6675 - DNA, 84 bp, Artificial
  Barcode component
  misc_feature (33)..(34): n is a, c, g, or t
  misc_feature (43)..(44): n is a, c, g, or t
  misc_feature (53)..(54): n is a, c, g, or t
tttttttaagcagtggtatcaacgcagagtacnngaagtaggnnacaacctcnntttttttttttttttttttttttttttttt

SEQ ID NO: 6676 - DNA, 84 bp, Artificial
  Barcode component
  misc_feature (33)..(34): n is a, c, g, or t
  misc_feature (43)..(44): n is a, c, g, or t
  misc_feature (53)..(54): n is a, c, g, or t
tttttttaagcagtggtatcaacgcagagtacnngaagtaggnncatggtagnntttttttttttttttttttttttttttttt

SEQ ID NO: 6677 - DNA, 84 bp, Artificial
  Barcode component
  misc_feature (33)..(34): n is a, c, g, or t
  misc_feature (43)..(44): n is a, c, g, or t
  misc_feature (53)..(54): n is a, c, g, or t
tttttttaagcagtggtatcaacgcagagtacnngaagtaggnncgtatctcnntttttttttttttttttttttttttttttt

SEQ ID NO: 6678 - DNA, 84 bp, Artificial
  Barcode component
  misc_feature (33)..(34): n is a, c, g, or t
  misc_feature (43)..(44): n is a, c, g, or t
  misc_feature (53)..(54): n is a, c, g, or t
tttttttaagcagtggtatcaacgcagagtacnngaagtaggnncctagttcnntttttttttttttttttttttttttttttt

SEQ ID NO: 6679 - DNA, 84 bp, Artificial
  Barcode component
  misc_feature (33)..(34): n is a, c, g, or t
  misc_feature (43)..(44): n is a, c, g, or t
  misc_feature (53)..(54): n is a, c, g, or t
tttttttaagcagtggtatcaacgcagagtacnngaagtaggnncaagagtcnntttttttttttttttttttttttttttttt

SEQ ID NO: 6680 - DNA, 84 bp, Artificial
  Barcode component
  misc_feature (33)..(34): n is a, c, g, or t
  misc_feature (43)..(44): n is a, c, g, or t
  misc_feature (53)..(54): n is a, c, g, or t
tttttttaagcagtggtatcaacgcagagtacnncggcatatnnaatcggcanntttttttttttttttttttttttttttttt

SEQ ID NO: 6681 - DNA, 84 bp, Artificial
  Barcode component
  misc_feature (33)..(34): n is a, c, g, or t
  misc_feature (43)..(44): n is a, c, g, or t
  misc_feature (53)..(54): n is a, c, g, or t
tttttttaagcagtggtatcaacgcagagtacnncggcatatnntacggcatnntttttttttttttttttttttttttttttt

SEQ ID NO: 6682 - DNA, 84 bp, Artificial
  Barcode component
  misc_feature (33)..(34): n is a, c, g, or t
  misc_feature (43)..(44): n is a, c, g, or t
  misc_feature (53)..(54): n is a, c, g, or t
tttttttaagcagtggtatcaacgcagagtacnncggcatatnnttggatcgnntttttttttttttttttttttttttttttt

SEQ ID NO: 6683 - DNA, 84 bp, Artificial
  Barcode component
  misc_feature (33)..(34): n is a, c, g, or t
  misc_feature (43)..(44): n is a, c, g, or t
  misc_feature (53)..(54): n is a, c, g, or t
tttttttaagcagtggtatcaacgcagagtacnncggcatatnntggaacganntttttttttttttttttttttttttttttt

SEQ ID NO: 6684 - DNA, 84 bp, Artificial
  Barcode component
  misc_feature (33)..(34): n is a, c, g, or t
  misc_feature (43)..(44): n is a, c, g, or t
  misc_feature (53)..(54): n is a, c, g, or t
tttttttaagcagtggtatcaacgcagagtacnncggcatatnnggcaatcanntttttttttttttttttttttttttttttt

SEQ ID NO: 6685 - DNA, 84 bp, Artificial
  Barcode component
  misc_feature (33)..(34): n is a, c, g, or t
  misc_feature (43)..(44): n is a, c, g, or t
  misc_feature (53)..(54): n is a, c, g, or t
tttttttaagcagtggtatcaacgcagagtacnncggcatatnngaatccganntttttttttttttttttttttttttttttt

SEQ ID NO: 6686 - DNA, 84 bp, Artificial
  Barcode component
  misc_feature (33)..(34): n is a, c, g, or t
  misc_feature (43)..(44): n is a, c, g, or t
  misc_feature (53)..(54): n is a, c, g, or t
tttttttaagcagtggtatcaacgcagagtacnncggcatatnnttacggtgnntttttttttttttttttttttttttttttt

SEQ ID NO: 6687 - DNA, 84 bp, Artificial
  Barcode component
  misc_feature (33)..(34): n is a, c, g, or t
  misc_feature (43)..(44): n is a, c, g, or t
  misc_feature (53)..(54): n is a, c, g, or t
tttttttaagcagtggtatcaacgcagagtacnncggcatatnncatatcggnntttttttttttttttttttttttttttttt

SEQ ID NO: 6688 - DNA, 84 bp, Artificial
  Barcode component
  misc_feature (33)..(34): n is a, c, g, or t
  misc_feature (43)..(44): n is a, c, g, or t
  misc_feature (53)..(54): n is a, c, g, or t
tttttttaagcagtggtatcaacgcagagtacnncggcatatnncttcggtanntttttttttttttttttttttttttttttt

SEQ ID NO: 6689 - DNA, 84 bp, Artificial
  Barcode component
  misc_feature (33)..(34): n is a, c, g, or t
  misc_feature (43)..(44): n is a, c, g, or t
  misc_feature (53)..(54): n is a, c, g, or t
tttttttaagcagtggtatcaacgcagagtacnncggcatatnntcctaacgnntttttttttttttttttttttttttttttt

SEQ ID NO: 6690 - DNA, 84 bp, Artificial
  Barcode component
  misc_feature (33)..(34): n is a, c, g, or t
  misc_feature (43)..(44): n is a, c, g, or t
  misc_feature (53)..(54): n is a, c, g, or t
tttttttaagcagtggtatcaacgcagagtacnncggcatatnngtaagccanntttttttttttttttttttttttttttttt

SEQ ID NO: 6691 - DNA, 84 bp, Artificial
  Barcode component
  misc_feature (33)..(34): n is a, c, g, or t
  misc_feature (43)..(44): n is a, c, g, or t
  misc_feature (53)..(54): n is a, c, g, or t
tttttttaagcagtggtatcaacgcagagtacnncggcatatnntaaggtggnntttttttttttttttttttttttttttttt

SEQ ID NO: 6692 - DNA, 84 bp, Artificial
  Barcode component
  misc_feature (33)..(34): n is a, c, g, or t
  misc_feature (43)..(44): n is a, c, g, or t
  misc_feature (53)..(54): n is a, c, g, or t
tttttttaagcagtggtatcaacgcagagtacnncggcatatnnggtaagctnntttttttttttttttttttttttttttttt

SEQ ID NO: 6693 - DNA, 84 bp, Artificial
  Barcode component
  misc_feature (33)..(34): n is a, c, g, or t
  misc_feature (43)..(44): n is a, c, g, or t
  misc_feature (53)..(54): n is a, c, g, or t
tttttttaagcagtggtatcaacgcagagtacnncggcatatnntgtgtcganntttttttttttttttttttttttttttttt

SEQ ID NO: 6694 - DNA, 84 bp, Artificial
  Barcode component
  misc_feature (33)..(34): n is a, c, g, or t
  misc_feature (43)..(44): n is a, c, g, or t
  misc_feature (53)..(54): n is a, c, g, or t
tttttttaagcagtggtatcaacgcagagtacnncggcatatnngagcatganntttttttttttttttttttttttttttttt

SEQ ID NO: 6695 - DNA, 84 bp, Artificial
  Barcode component
  misc_feature (33)..(34): n is a, c, g, or t
  misc_feature (43)..(44): n is a, c, g, or t
  misc_feature (53)..(54): n is a, c, g, or t
tttttttaagcagtggtatcaacgcagagtacnncggcatatnntcgaagtcnntttttttttttttttttttttttttttttt

SEQ ID NO: 6696 - DNA, 84 bp, Artificial
  Barcode component
  misc_feature (33)..(34): n is a, c, g, or t
  misc_feature (43)..(44): n is a, c, g, or t
  misc_feature (53)..(54): n is a, c, g, or t
tttttttaagcagtggtatcaacgcagagtacnncggcatatnnggtgaacanntttttttttttttttttttttttttttttt

SEQ ID NO: 6697 - DNA, 84 bp, Artificial
  Barcode component
  misc_feature (33)..(34): n is a, c, g, or t
  misc_feature (43)..(44): n is a, c, g, or t
  misc_feature (53)..(54): n is a, c, g, or t
tttttttaagcagtggtatcaacgcagagtacnncggcatatnnacatgcacnntttttttttttttttttttttttttttttt

SEQ ID NO: 6698 - DNA, 84 bp, Artificial
  Barcode component
  misc_feature (33)..(34): n is a, c, g, or t
  misc_feature (43)..(44): n is a, c, g, or t
  misc_feature (53)..(54): n is a, c, g, or t
tttttttaagcagtggtatcaacgcagagtacnncggcatatnnccaacagtnntttttttttttttttttttttttttttttt

SEQ ID NO: 6699 - DNA, 84 bp, Artificial
  Barcode component
  misc_feature (33)..(34): n is a, c, g, or t
  misc_feature (43)..(44): n is a, c, g, or t
  misc_feature (53)..(54): n is a, c, g, or t
tttttttaagcagtggtatcaacgcagagtacnncggcatatnnagaacagcnntttttttttttttttttttttttttttttt

SEQ ID NO: 6700 - DNA, 84 bp, Artificial
  Barcode component
  misc_feature (33)..(34): n is a, c, g, or t
  misc_feature (43)..(44): n is a, c, g, or t
  misc_feature (53)..(54): n is a, c, g, or t
tttttttaagcagtggtatcaacgcagagtacnncggcatatnngaacacgtnntttttttttttttttttttttttttttttt

SEQ ID NO: 6701 - DNA, 84 bp, Artificial
  Barcode component
  misc_feature (33)..(34): n is a, c, g, or t
  misc_feature (43)..(44): n is a, c, g, or t
  misc_feature (53)..(54): n is a, c, g, or t
tttttttaagcagtggtatcaacgcagagtacnncggcatatnnggtcttcanntttttttttttttttttttttttttttttt

SEQ ID NO: 6702 - DNA, 84 bp, Artificial
  Barcode component
  misc_feature (33)..(34): n is a, c, g, or t
  misc_feature (43)..(44): n is a, c, g, or t
  misc_feature (53)..(54): n is a, c, g, or t
tttttttaagcagtggtatcaacgcagagtacnncggcatatnnaggttcagnntttttttttttttttttttttttttttttt

SEQ ID NO: 6703 - DNA, 84 bp, Artificial
  Barcode component
  misc_feature (33)..(34): n is a, c, g, or t
  misc_feature (43)..(44): n is a, c, g, or t
  misc_feature (53)..(54): n is a, c, g, or t
tttttttaagcagtggtatcaacgcagagtacnncggcatatnnctagagcanntttttttttttttttttttttttttttttt

SEQ ID NO: 6704 - DNA, 84 bp, Artificial
  Barcode component
  misc_feature (33)..(34): n is a, c, g, or t
  misc_feature (43)..(44): n is a, c, g, or t
  misc_feature (53)..(54): n is a, c, g, or t
tttttttaagcagtggtatcaacgcagagtacnncggcatatnncttctagcnntttttttttttttttttttttttttttttt

SEQ ID NO: 6705 - DNA, 84 bp, Artificial
  Barcode component
  misc_feature (33)..(34): n is a, c, g, or t
  misc_feature (43)..(44): n is a, c, g, or t
  misc_feature (53)..(54): n is a, c, g, or t
tttttttaagcagtggtatcaacgcagagtacnncggcatatnngagtaacgnntttttttttttttttttttttttttttttt

SEQ ID NO: 6706 - DNA, 84 bp, Artificial
  Barcode component
  misc_feature (33)..(34): n is a, c, g, or t
  misc_feature (43)..(44): n is a, c, g, or t
  misc_feature (53)..(54): n is a, c, g, or t
tttttttaagcagtggtatcaacgcagagtacnncggcatatnnctaagaggnntttttttttttttttttttttttttttttt

SEQ ID NO: 6707 - DNA, 84 bp, Artificial
  Barcode component
  misc_feature (33)..(34): n is a, c, g, or t
  misc_feature (43)..(44): n is a, c, g, or t
  misc_feature (53)..(54): n is a, c, g, or t
tttttttaagcagtggtatcaacgcagagtacnncggcatatnnacgtgtagnntttttttttttttttttttttttttttttt

SEQ ID NO: 6708 - DNA, 84 bp, Artificial
  Barcode component
  misc_feature (33)..(34): n is a, c, g, or t
  misc_feature (43)..(44): n is a, c, g, or t
  misc_feature (53)..(54): n is a, c, g, or t
tttttttaagcagtggtatcaacgcagagtacnncggcatatnnactacaggnntttttttttttttttttttttttttttttt

SEQ ID NO: 6709 - DNA, 84 bp, Artificial
  Barcode component
  misc_feature (33)..(34): n is a, c, g, or t
  misc_feature (43)..(44): n is a, c, g, or t
  misc_feature (53)..(54): n is a, c, g, or t
tttttttaagcagtggtatcaacgcagagtacnncggcatatnntacaggtcnntttttttttttttttttttttttttttttt

SEQ ID NO: 6710 - DNA, 84 bp, Artificial
  Barcode component
  misc_feature (33)..(34): n is a, c, g, or t
  misc_feature (43)..(44): n is a, c, g, or t
  misc_feature (53)..(54): n is a, c, g, or t
tttttttaagcagtggtatcaacgcagagtacnncggcatatnnctcacatgnntttttttttttttttttttttttttttttt

SEQ ID NO: 6711 - DNA, 84 bp, Artificial
  Barcode component
  misc_feature (33)..(34): n is a, c, g, or t
  misc_feature (43)..(44): n is a, c, g, or t
  misc_feature (53)..(54): n is a, c, g, or t
tttttttaagcagtggtatcaacgcagagtacnncggcatatnnactaggagnntttttttttttttttttttttttttttttt

SEQ ID NO: 6712 - DNA, 84 bp, Artificial
  Barcode component
  misc_feature (33)..(34): n is a, c, g, or t
  misc_feature (43)..(44): n is a, c, g, or t
  misc_feature (53)..(54): n is a, c, g, or t
tttttttaagcagtggtatcaacgcagagtacnncggcatatnnccatagganntttttttttttttttttttttttttttttt

SEQ ID NO: 6713 - DNA, 84 bp, Artificial
  Barcode component
  misc_feature (33)..(34): n is a, c, g, or t
  misc_feature (43)..(44): n is a, c, g, or t
  misc_feature (53)..(54): n is a, c, g, or t
tttttttaagcagtggtatcaacgcagagtacnncggcatatnnggagaatcnntttttttttttttttttttttttttttttt

SEQ ID NO: 6714 - DNA, 84 bp, Artificial
  Barcode component
  misc_feature (33)..(34): n is a, c, g, or t
  misc_feature (43)..(44): n is a, c, g, or t
  misc_feature (53)..(54): n is a, c, g, or t
tttttttaagcagtggtatcaacgcagagtacnncggcatatnngccaagaanntttttttttttttttttttttttttttttt

SEQ ID NO: 6715 - DNA, 84 bp, Artificial
  Barcode component
  misc_feature (33)..(34): n is a, c, g, or t
  misc_feature (43)..(44): n is a, c, g, or t
  misc_feature (53)..(54): n is a, c, g, or t
tttttttaagcagtggtatcaacgcagagtacnncggcatatnnaaggcaagnntttttttttttttttttttttttttttttt

SEQ ID NO: 6716 - DNA, 84 bp, Artificial
  Barcode component
  misc_feature (33)..(34): n is a, c, g, or t
  misc_feature (43)..(44): n is a, c, g, or t
  misc_feature (53)..(54): n is a, c, g, or t
tttttttaagcagtggtatcaacgcagagtacnncggcatatnnaatgtcgcnntttttttttttttttttttttttttttttt

SEQ ID NO: 6717 - DNA, 84 bp, Artificial
  Barcode component
  misc_feature (33)..(34): n is a, c, g, or t
  misc_feature (43)..(44): n is a, c, g, or t
  misc_feature (53)..(54): n is a, c, g, or t
tttttttaagcagtggtatcaacgcagagtacnncggcatatnnatggaaccnntttttttttttttttttttttttttttttt

SEQ ID NO: 6718 - DNA, 84 bp, Artificial
  Barcode component
  misc_feature (33)..(34): n is a, c, g, or t
  misc_feature (43)..(44): n is a, c, g, or t
  misc_feature (53)..(54): n is a, c, g, or t
tttttttaagcagtggtatcaacgcagagtacnncggcatatnnagaggcatnntttttttttttttttttttttttttttttt

SEQ ID NO: 6719 - DNA, 84 bp, Artificial
  Barcode component
  misc_feature (33)..(34): n is a, c, g, or t
  misc_feature (43)..(44): n is a, c, g, or t
  misc_feature (53)..(54): n is a, c, g, or t
tttttttaagcagtggtatcaacgcagagtacnncggcatatnntgcatagcnntttttttttttttttttttttttttttttt

SEQ ID NO: 6720 - DNA, 84 bp, Artificial
  Barcode component
  misc_feature (33)..(34): n is a, c, g, or t
  misc_feature (43)..(44): n is a, c, g, or t
  misc_feature (53)..(54): n is a, c, g, or t
tttttttaagcagtggtatcaacgcagagtacnncggcatatnnctaacgganntttttttttttttttttttttttttttttt

SEQ ID NO: 6721 - DNA, 84 bp, Artificial
  Barcode component
  misc_feature (33)..(34): n is a, c, g, or t
  misc_feature (43)..(44): n is a, c, g, or t
  misc_feature (53)..(54): n is a, c, g, or t
tttttttaagcagtggtatcaacgcagagtacnncggcatatnntatcgaggnntttttttttttttttttttttttttttttt

SEQ ID NO: 6722 - DNA, 84 bp, Artificial
  Barcode component
  misc_feature (33)..(34): n is a, c, g, or t
  misc_feature (43)..(44): n is a, c, g, or t
  misc_feature (53)..(54): n is a, c, g, or t
tttttttaagcagtggtatcaacgcagagtacnncggcatatnncatagcctnntttttttttttttttttttttttttttttt

SEQ ID NO: 6723 - DNA, 84 bp, Artificial
  Barcode component
  misc_feature (33)..(34): n is a, c, g, or t
  misc_feature (43)..(44): n is a, c, g, or t
  misc_feature (53)..(54): n is a, c, g, or t
tttttttaagcagtggtatcaacgcagagtacnncggcatatnnatcgagacnntttttttttttttttttttttttttttttt

SEQ ID NO: 6724 - DNA, 84 bp, Artificial
  Barcode component
  misc_feature (33)..(34): n is a, c, g, or t
  misc_feature (43)..(44): n is a, c, g, or t
  misc_feature (53)..(54): n is a, c, g, or t
tttttttaagcagtggtatcaacgcagagtacnncggcatatnnggaagagtnntttttttttttttttttttttttttttttt

SEQ ID NO: 6725 - DNA, 84 bp, Artificial
  Barcode component
  misc_feature (33)..(34): n is a, c, g, or t
  misc_feature (43)..(44): n is a, c, g, or t
  misc_feature (53)..(54): n is a, c, g, or t
tttttttaagcagtggtatcaacgcagagtacnncggcatatnnccaagtagnntttttttttttttttttttttttttttttt

SEQ ID NO: 6726 - DNA, 84 bp, Artificial
  Barcode component
  misc_feature (33)..(34): n is a, c, g, or t
  misc_feature (43)..(44): n is a, c, g, or t
  misc_feature (53)..(54): n is a, c, g, or t
tttttttaagcagtggtatcaacgcagagtacnncggcatatnnctgaacagnntttttttttttttttttttttttttttttt

SEQ ID NO: 6727 - DNA, 84 bp, Artificial
  Barcode component
  misc_feature (33)..(34): n is a, c, g, or t
  misc_feature (43)..(44): n is a, c, g, or t
  misc_feature (53)..(54): n is a, c, g, or t
tttttttaagcagtggtatcaacgcagagtacnncggcatatnngtaggttcnntttttttttttttttttttttttttttttt

SEQ ID NO: 6728 - DNA, 84 bp, Artificial
  Barcode component
  misc_feature (33)..(34): n is a, c, g, or t
  misc_feature (43)..(44): n is a, c, g, or t
  misc_feature (53)..(54): n is a, c, g, or t
tttttttaagcagtggtatcaacgcagagtacnncggcatatnngtatggacnntttttttttttttttttttttttttttttt

SEQ ID NO: 6729 - DNA, 84 bp, Artificial
  Barcode component
  misc_feature (33)..(34): n is a, c, g, or t
  misc_feature (43)..(44): n is a, c, g, or t
  misc_feature (53)..(54): n is a, c, g, or t
tttttttaagcagtggtatcaacgcagagtacnncggcatatnntcgcaacanntttttttttttttttttttttttttttttt

SEQ ID NO: 6730 - DNA, 84 bp, Artificial
  Barcode component
  misc_feature (33)..(34): n is a, c, g, or t
  misc_feature (43)..(44): n is a, c, g, or t
  misc_feature (53)..(54): n is a, c, g, or t
tttttttaagcagtggtatcaacgcagagtacnncggcatatnnccgctaatnntttttttttttttttttttttttttttttt

SEQ ID NO: 6731 - DNA, 84 bp, Artificial
  Barcode component
  misc_feature (33)..(34): n is a, c, g, or t
  misc_feature (43)..(44): n is a, c, g, or t
  misc_feature (53)..(54): n is a, c, g, or t
tttttttaagcagtggtatcaacgcagagtacnncggcatatnngattcgcanntttttttttttttttttttttttttttttt

SEQ ID NO: 6732 - DNA, 84 bp, Artificial
  Barcode component
  misc_feature (33)..(34): n is a, c, g, or t
  misc_feature (43)..(44): n is a, c, g, or t
  misc_feature (53)..(54): n is a, c, g, or t
tttttttaagcagtggtatcaacgcagagtacnncggcatatnncgatggaanntttttttttttttttttttttttttttttt

SEQ ID NO: 6733 - DNA, 84 bp, Artificial
  Barcode component
  misc_feature (33)..(34): n is a, c, g, or t
  misc_feature (43)..(44): n is a, c, g, or t
  misc_feature (53)..(54): n is a, c, g, or t
tttttttaagcagtggtatcaacgcagagtacnncggcatatnnagcaagganntttttttttttttttttttttttttttttt

SEQ ID NO: 6734 - DNA, 84 bp, Artificial
  Barcode component
  misc_feature (33)..(34): n is a, c, g, or t
  misc_feature (43)..(44): n is a, c, g, or t
  misc_feature (53)..(54): n is a, c, g, or t
tttttttaagcagtggtatcaacgcagagtacnncggcatatnncgtagcaanntttttttttttttttttttttttttttttt

SEQ ID NO: 6735 - DNA, 84 bp, Artificial
  Barcode component
  misc_feature (33)..(34): n is a, c, g, or t
  misc_feature (43)..(44): n is a, c, g, or t
  misc_feature (53)..(54): n is a, c, g, or t
tttttttaagcagtggtatcaacgcagagtacnncggcatatnntggcagtanntttttttttttttttttttttttttttttt

SEQ ID NO: 6736 - DNA, 84 bp, Artificial
  Barcode component
  misc_feature (33)..(34): n is a, c, g, or t
  misc_feature (43)..(44): n is a, c, g, or t
  misc_feature (53)..(54): n is a, c, g, or t
tttttttaagcagtggtatcaacgcagagtacnncggcatatnncggtagttnntttttttttttttttttttttttttttttt

SEQ ID NO: 6737 - DNA, 84 bp, Artificial
  Barcode component
  misc_feature (33)..(34): n is a, c, g, or t
  misc_feature (43)..(44): n is a, c, g, or t
  misc_feature (53)..(54): n is a, c, g, or t
tttttttaagcagtggtatcaacgcagagtacnncggcatatnntgacttcgnntttttttttttttttttttttttttttttt

SEQ ID NO: 6738 - DNA, 84 bp, Artificial
  Barcode component
  misc_feature (33)..(34): n is a, c, g, or t
  misc_feature (43)..(44): n is a, c, g, or t
  misc_feature (53)..(54): n is a, c, g, or t
tttttttaagcagtggtatcaacgcagagtacnncggcatatnngagtgcaanntttttttttttttttttttttttttttttt

SEQ ID NO: 6739 - DNA, 84 bp, Artificial
  Barcode component
  misc_feature (33)..(34): n is a, c, g, or t
  misc_feature (43)..(44): n is a, c, g, or t
  misc_feature (53)..(54): n is a, c, g, or t
tttttttaagcagtggtatcaacgcagagtacnncggcatatnnacggtaacnntttttttttttttttttttttttttttttt

SEQ ID NO: 6740 - DNA, 84 bp, Artificial
  Barcode component
  misc_feature (33)..(34): n is a, c, g, or t
  misc_feature (43)..(44): n is a, c, g, or t
  misc_feature (53)..(54): n is a, c, g, or t
tttttttaagcagtggtatcaacgcagagtacnncggcatatnnaagtggtgnntttttttttttttttttttttttttttttt

SEQ ID NO: 6741 - DNA, 84 bp, Artificial
  Barcode component
  misc_feature (33)..(34): n is a, c, g, or t
  misc_feature (43)..(44): n is a, c, g, or t
  misc_feature (53)..(54): n is a, c, g, or t
tttttttaagcagtggtatcaacgcagagtacnncggcatatnnggagacaanntttttttttttttttttttttttttttttt

SEQ ID NO: 6742 - DNA, 84 bp, Artificial
  Barcode component
  misc_feature (33)..(34): n is a, c, g, or t
  misc_feature (43)..(44): n is a, c, g, or t
  misc_feature (53)..(54): n is a, c, g, or t
tttttttaagcagtggtatcaacgcagagtacnncggcatatnntcaaggacnntttttttttttttttttttttttttttttt

SEQ ID NO: 6743 - DNA, 84 bp, Artificial
  Barcode component
  misc_feature (33)..(34): n is a, c, g, or t
  misc_feature (43)..(44): n is a, c, g, or t
  misc_feature (53)..(54): n is a, c, g, or t
tttttttaagcagtggtatcaacgcagagtacnncggcatatnnaagagagcnntttttttttttttttttttttttttttttt

SEQ ID NO: 6744 - DNA, 84 bp, Artificial
  Barcode component
  misc_feature (33)..(34): n is a, c, g, or t
  misc_feature (43)..(44): n is a, c, g, or t
  misc_feature (53)..(54): n is a, c, g, or t
tttttttaagcagtggtatcaacgcagagtacnncggcatatnncgagagatnntttttttttttttttttttttttttttttt

SEQ ID NO: 6745 - DNA, 84 bp, Artificial
  Barcode component
  misc_feature (33)..(34): n is a, c, g, or t
  misc_feature (43)..(44): n is a, c, g, or t
  misc_feature (53)..(54): n is a, c, g, or t
tttttttaagcagtggtatcaacgcagagtacnncggcatatnnacagatggnntttttttttttttttttttttttttttttt

SEQ ID NO: 6746 - DNA, 84 bp, Artificial
  Barcode component
  misc_feature (33)..(34): n is a, c, g, or t
  misc_feature (43)..(44): n is a, c, g, or t
  misc_feature (53)..(54): n is a, c, g, or t
tttttttaagcagtggtatcaacgcagagtacnncggcatatnnaggagtcanntttttttttttttttttttttttttttttt

SEQ ID NO: 6747 - DNA, 84 bp, Artificial
  Barcode component
  misc_feature (33)..(34): n is a, c, g, or t
  misc_feature (43)..(44): n is a, c, g, or t
  misc_feature (53)..(54): n is a, c, g, or t
tttttttaagcagtggtatcaacgcagagtacnncggcatatnncgtgttacnntttttttttttttttttttttttttttttt

SEQ ID NO: 6748 - DNA, 84 bp, Artificial
  Barcode component
  misc_feature (33)..(34): n is a, c, g, or t
  misc_feature (43)..(44): n is a, c, g, or t
  misc_feature (53)..(54): n is a, c, g, or t
tttttttaagcagtggtatcaacgcagagtacnncggcatatnntagtgtgcnntttttttttttttttttttttttttttttt

SEQ ID NO: 6749 - DNA, 84 bp, Artificial
  Barcode component
  misc_feature (33)..(34): n is a, c, g, or t
  misc_feature (43)..(44): n is a, c, g, or t
  misc_feature (53)..(54): n is a, c, g, or t
tttttttaagcagtggtatcaacgcagagtacnncggcatatnnctcatgacnntttttttttttttttttttttttttttttt

SEQ ID NO: 6750 - DNA, 84 bp, Artificial
  Barcode component
  misc_feature (33)..(34): n is a, c, g, or t
  misc_feature (43)..(44): n is a, c, g, or t
  misc_feature (53)..(54): n is a, c, g, or t
tttttttaagcagtggtatcaacgcagagtacnncggcatatnngtatccagnntttttttttttttttttttttttttttttt

SEQ ID NO: 6751 - DNA, 84 bp, Artificial
  Barcode component
  misc_feature (33)..(34): n is a, c, g, or t
  misc_feature (43)..(44): n is a, c, g, or t
  misc_feature (53)..(54): n is a, c, g, or t
tttttttaagcagtggtatcaacgcagagtacnncggcatatnnacgcctatnntttttttttttttttttttttttttttttt

SEQ ID NO: 6752 - DNA, 84 bp, Artificial
  Barcode component
  misc_feature (33)..(34): n is a, c, g, or t
  misc_feature (43)..(44): n is a, c, g, or t
  misc_feature (53)..(54): n is a, c, g, or t
tttttttaagcagtggtatcaacgcagagtacnncggcatatnnaacgacctnntttttttttttttttttttttttttttttt

SEQ ID NO: 6753 - DNA, 84 bp, Artificial
  Barcode component
  misc_feature (33)..(34): n is a, c, g, or t
  misc_feature (43)..(44): n is a, c, g, or t
  misc_feature (53)..(54): n is a, c, g, or t
tttttttaagcagtggtatcaacgcagagtacnncggcatatnnatcaggctnntttttttttttttttttttttttttttttt

SEQ ID NO: 6754 - DNA, 84 bp, Artificial
  Barcode component
  misc_feature (33)..(34): n is a, c, g, or t
  misc_feature (43)..(44): n is a, c, g, or t
  misc_feature (53)..(54): n is a, c, g, or t
tttttttaagcagtggtatcaacgcagagtacnncggcatatnncaagttcgnntttttttttttttttttttttttttttttt

SEQ ID NO: 6755 - DNA, 84 bp, Artificial
  Barcode component
  misc_feature (33)..(34): n is a, c, g, or t
  misc_feature (43)..(44): n is a, c, g, or t
  misc_feature (53)..(54): n is a, c, g, or t
tttttttaagcagtggtatcaacgcagagtacnncggcatatnntagccaganntttttttttttttttttttttttttttttt

SEQ ID NO: 6756 - DNA, 84 bp, Artificial
  Barcode component
  misc_feature (33)..(34): n is a, c, g, or t
  misc_feature (43)..(44): n is a, c, g, or t
  misc_feature (53)..(54): n is a, c, g, or t
tttttttaagcagtggtatcaacgcagagtacnncggcatatnncaatcacgnntttttttttttttttttttttttttttttt

SEQ ID NO: 6757 - DNA, 84 bp, Artificial
  Barcode component
  misc_feature (33)..(34): n is a, c, g, or t
  misc_feature (43)..(44): n is a, c, g, or t
  misc_feature (53)..(54): n is a, c, g, or t
tttttttaagcagtggtatcaacgcagagtacnncggcatatnngcaacaagnntttttttttttttttttttttttttttttt

SEQ ID NO: 6758 - DNA, 84 bp, Artificial
  Barcode component
  misc_feature (33)..(34): n is a, c, g, or t
  misc_feature (43)..(44): n is a, c, g, or t
  misc_feature (53)..(54): n is a, c, g, or t
tttttttaagcagtggtatcaacgcagagtacnncggcatatnncacgacaanntttttttttttttttttttttttttttttt

SEQ ID NO: 6759 - DNA, 84 bp, Artificial
  Barcode component
  misc_feature (33)..(34): n is a, c, g, or t
  misc_feature (43)..(44): n is a, c, g, or t
  misc_feature (53)..(54): n is a, c, g, or t
tttttttaagcagtggtatcaacgcagagtacnncggcatatnntacggaganntttttttttttttttttttttttttttttt

SEQ ID NO: 6760 - DNA, 84 bp, Artificial
  Barcode component
  misc_feature (33)..(34): n is a, c, g, or t
  misc_feature (43)..(44): n is a, c, g, or t
  misc_feature (53)..(54): n is a, c, g, or t
tttttttaagcagtggtatcaacgcagagtacnncggcatatnncgacaaganntttttttttttttttttttttttttttttt

SEQ ID NO: 6761 - DNA, 84 bp, Artificial
  Barcode component
  misc_feature (33)..(34): n is a, c, g, or t
  misc_feature (43)..(44): n is a, c, g, or t
  misc_feature (53)..(54): n is a, c, g, or t
tttttttaagcagtggtatcaacgcagagtacnncggcatatnncgaagtganntttttttttttttttttttttttttttttt

SEQ ID NO: 6762 - DNA, 84 bp, Artificial
  Barcode component
  misc_feature (33)..(34): n is a, c, g, or t
  misc_feature (43)..(44): n is a, c, g, or t
  misc_feature (53)..(54): n is a, c, g, or t
tttttttaagcagtggtatcaacgcagagtacnncggcatatnnagctggtanntttttttttttttttttttttttttttttt

SEQ ID NO: 6763 - DNA, 84 bp, Artificial
  Barcode component
  misc_feature (33)..(34): n is a, c, g, or t
  misc_feature (43)..(44): n is a, c, g, or t
  misc_feature (53)..(54): n is a, c, g, or t
tttttttaagcagtggtatcaacgcagagtacnncggcatatnnaactaggcnntttttttttttttttttttttttttttttt

SEQ ID NO: 6764 - DNA, 84 bp, Artificial
  Barcode component
  misc_feature (33)..(34): n is a, c, g, or t
  misc_feature (43)..(44): n is a, c, g, or t
  misc_feature (53)..(54): n is a, c, g, or t
tttttttaagcagtggtatcaacgcagagtacnncggcatatnncagcaagtnntttttttttttttttttttttttttttttt

SEQ ID NO: 6765 - DNA, 84 bp, Artificial
  Barcode component
  misc_feature (33)..(34): n is a, c, g, or t
  misc_feature (43)..(44): n is a, c, g, or t
  misc_feature (53)..(54): n is a, c, g, or t
tttttttaagcagtggtatcaacgcagagtacnncggcatatnnacgaggtanntttttttttttttttttttttttttttttt

SEQ ID NO: 6766 - DNA, 84 bp, Artificial
  Barcode component
  misc_feature (33)..(34): n is a, c, g, or t
  misc_feature (43)..(44): n is a, c, g, or t
  misc_feature (53)..(54): n is a, c, g, or t
tttttttaagcagtggtatcaacgcagagtacnncggcatatnncatcttccnntttttttttttttttttttttttttttttt

SEQ ID NO: 6767 - DNA, 84 bp, Artificial
  Barcode component
  misc_feature (33)..(34): n is a, c, g, or t
  misc_feature (43)..(44): n is a, c, g, or t
  misc_feature (53)..(54): n is a, c, g, or t
tttttttaagcagtggtatcaacgcagagtacnncggcatatnncctgaatcnntttttttttttttttttttttttttttttt

SEQ ID NO: 6768 - DNA, 84 bp, Artificial
  Barcode component
  misc_feature (33)..(34): n is a, c, g, or t
  misc_feature (43)..(44): n is a, c, g, or t
  misc_feature (53)..(54): n is a, c, g, or t
tttttttaagcagtggtatcaacgcagagtacnncggcatatnntgcagactnntttttttttttttttttttttttttttttt

SEQ ID NO: 6769 - DNA, 84 bp, Artificial
  Barcode component
  misc_feature (33)..(34): n is a, c, g, or t
  misc_feature (43)..(44): n is a, c, g, or t
  misc_feature (53)..(54): n is a, c, g, or t
tttttttaagcagtggtatcaacgcagagtacnncggcatatnnagatgtggnntttttttttttttttttttttttttttttt

SEQ ID NO: 6770 - DNA, 84 bp, Artificial
  Barcode component
  misc_feature (33)..(34): n is a, c, g, or t
  misc_feature (43)..(44): n is a, c, g, or t
  misc_feature (53)..(54): n is a, c, g, or t
tttttttaagcagtggtatcaacgcagagtacnncggcatatnnagttcgacnntttttttttttttttttttttttttttttt

SEQ ID NO: 6771 - DNA, 84 bp, Artificial
  Barcode component
  misc_feature (33)..(34): n is a, c, g, or t
  misc_feature (43)..(44): n is a, c, g, or t
  misc_feature (53)..(54): n is a, c, g, or t
tttttttaagcagtggtatcaacgcagagtacnncggcatatnnacaacctcnntttttttttttttttttttttttttttttt

SEQ ID NO: 6772 - DNA, 84 bp, Artificial
  Barcode component
  misc_feature (33)..(34): n is a, c, g, or t
  misc_feature (43)..(44): n is a, c, g, or t
  misc_feature (53)..(54): n is a, c, g, or t
tttttttaagcagtggtatcaacgcagagtacnncggcatatnncatggtagnntttttttttttttttttttttttttttttt

SEQ ID NO: 6773 - DNA, 84 bp, Artificial
  Barcode component
  misc_feature (33)..(34): n is a, c, g, or t
  misc_feature (43)..(44): n is a, c, g, or t
  misc_feature (53)..(54): n is a, c, g, or t
tttttttaagcagtggtatcaacgcagagtacnncggcatatnncgtatctcnntttttttttttttttttttttttttttttt

SEQ ID NO: 6774 - DNA, 84 bp, Artificial
  Barcode component
  misc_feature (33)..(34): n is a, c, g, or t
  misc_feature (43)..(44): n is a, c, g, or t
  misc_feature (53)..(54): n is a, c, g, or t
tttttttaagcagtggtatcaacgcagagtacnncggcatatnncctagttcnntttttttttttttttttttttttttttttt

SEQ ID NO: 6775 - DNA, 84 bp, Artificial
  Barcode component
  misc_feature (33)..(34): n is a, c, g, or t
  misc_feature (43)..(44): n is a, c, g, or t
  misc_feature (53)..(54): n is a, c, g, or t
tttttttaagcagtggtatcaacgcagagtacnncggcatatnncaagagtcnntttttttttttttttttttttttttttttt

SEQ ID NO: 6776 - DNA, 84 bp, Artificial
  Barcode component
  misc_feature (33)..(34): n is a, c, g, or t
  misc_feature (43)..(44): n is a, c, g, or t
  misc_feature (53)..(54): n is a, c, g, or t
tttttttaagcagtggtatcaacgcagagtacnncggaagaannaatcggcanntttttttttttttttttttttttttttttt

SEQ ID NO: 6777 - DNA, 84 bp, Artificial
  Barcode component
  misc_feature (33)..(34): n is a, c, g, or t
  misc_feature (43)..(44): n is a, c, g, or t
  misc_feature (53)..(54): n is a, c, g, or t
tttttttaagcagtggtatcaacgcagagtacnncggaagaanntacggcatnntttttttttttttttttttttttttttttt

SEQ ID NO: 6778 - DNA, 84 bp, Artificial
  Barcode component
  misc_feature (33)..(34): n is a, c, g, or t
  misc_feature (43)..(44): n is a, c, g, or t
  misc_feature (53)..(54): n is a, c, g, or t
tttttttaagcagtggtatcaacgcagagtacnncggaagaannttggatcgnntttttttttttttttttttttttttttttt

SEQ ID NO: 6779 - DNA, 84 bp, Artificial
  Barcode component
  misc_feature (33)..(34): n is a, c, g, or t
  misc_feature (43)..(44): n is a, c, g, or t
  misc_feature (53)..(54): n is a, c, g, or t
tttttttaagcagtggtatcaacgcagagtacnncggaagaanntggaacganntttttttttttttttttttttttttttttt

SEQ ID NO: 6780 - DNA, 84 bp, Artificial
  Barcode component
  misc_feature (33)..(34): n is a, c, g, or t
  misc_feature (43)..(44): n is a, c, g, or t
  misc_feature (53)..(54): n is a, c, g, or t
tttttttaagcagtggtatcaacgcagagtacnncggaagaannggcaatcanntttttttttttttttttttttttttttttt

SEQ ID NO: 6781 - DNA, 84 bp, Artificial
  Barcode component
  misc_feature (33)..(34): n is a, c, g, or t
  misc_feature (43)..(44): n is a, c, g, or t
  misc_feature (53)..(54): n is a, c, g, or t
tttttttaagcagtggtatcaacgcagagtacnncggaagaanngaatccganntttttttttttttttttttttttttttttt

SEQ ID NO: 6782 - DNA, 84 bp, Artificial
  Barcode component
  misc_feature (33)..(34): n is a, c, g, or t
  misc_feature (43)..(44): n is a, c, g, or t
  misc_feature (53)..(54): n is a, c, g, or t
tttttttaagcagtggtatcaacgcagagtacnncggaagaannttacggtgnntttttttttttttttttttttttttttttt

SEQ ID NO: 6783 - DNA, 84 bp, Artificial
  Barcode component
  misc_feature (33)..(34): n is a, c, g, or t
  misc_feature (43)..(44): n is a, c, g, or t
  misc_feature (53)..(54): n is a, c, g, or t
tttttttaagcagtggtatcaacgcagagtacnncggaagaanncatatcggnntttttttttttttttttttttttttttttt

SEQ ID NO: 6784 - DNA, 84 bp, Artificial
  Barcode component
  misc_feature (33)..(34): n is a, c, g, or t
  misc_feature (43)..(44): n is a, c, g, or t
  misc_feature (53)..(54): n is a, c, g, or t
tttttttaagcagtggtatcaacgcagagtacnncggaagaanncttcggtanntttttttttttttttttttttttttttttt

SEQ ID NO: 6785 - DNA, 84 bp, Artificial
  Barcode component
  misc_feature (33)..(34): n is a, c, g, or t
  misc_feature (43)..(44): n is a, c, g, or t
  misc_feature (53)..(54): n is a, c, g, or t
tttttttaagcagtggtatcaacgcagagtacnncggaagaanntcctaacgnntttttttttttttttttttttttttttttt

SEQ ID NO: 6786 - DNA, 84 bp, Artificial
  Barcode component
  misc_feature (33)..(34): n is a, c, g, or t
  misc_feature (43)..(44): n is a, c, g, or t
  misc_feature (53)..(54): n is a, c, g, or t
tttttttaagcagtggtatcaacgcagagtacnncggaagaanngtaagccanntttttttttttttttttttttttttttttt

SEQ ID NO: 6787 - DNA, 84 bp, Artificial
  Barcode component
  misc_feature (33)..(34): n is a, c, g, or t
  misc_feature (43)..(44): n is a, c, g, or t
  misc_feature (53)..(54): n is a, c, g, or t
tttttttaagcagtggtatcaacgcagagtacnncggaagaanntaaggtggnntttttttttttttttttttttttttttttt

SEQ ID NO: 6788 - DNA, 84 bp, Artificial
  Barcode component
  misc_feature (33)..(34): n is a, c, g, or t
  misc_feature (43)..(44): n is a, c, g, or t
  misc_feature (53)..(54): n is a, c, g, or t
tttttttaagcagtggtatcaacgcagagtacnncggaagaannggtaagctnntttttttttttttttttttttttttttttt

SEQ ID NO: 6789 - DNA, 84 bp, Artificial
  Barcode component
  misc_feature (33)..(34): n is a, c, g, or t
  misc_feature (43)..(44): n is a, c, g, or t
  misc_feature (53)..(54): n is a, c, g, or t
tttttttaagcagtggtatcaacgcagagtacnncggaagaanntgtgtcganntttttttttttttttttttttttttttttt

SEQ ID NO: 6790 - DNA, 84 bp, Artificial
  Barcode component
  misc_feature (33)..(34): n is a, c, g, or t
  misc_feature (43)..(44): n is a, c, g, or t
  misc_feature (53)..(54): n is a, c, g, or t
tttttttaagcagtggtatcaacgcagagtacnncggaagaanngagcatganntttttttttttttttttttttttttttttt

SEQ ID NO: 6791 - DNA, 84 bp, Artificial
  Barcode component
  misc_feature (33)..(34): n is a, c, g, or t
  misc_feature (43)..(44): n is a, c, g, or t
  misc_feature (53)..(54): n is a, c, g, or t
tttttttaagcagtggtatcaacgcagagtacnncggaagaanntcgaagtcnntttttttttttttttttttttttttttttt

SEQ ID NO: 6792 - DNA, 84 bp, Artificial
  Barcode component
  misc_feature (33)..(34): n is a, c, g, or t
  misc_feature (43)..(44): n is a, c, g, or t
  misc_feature (53)..(54): n is a, c, g, or t
tttttttaagcagtggtatcaacgcagagtacnncggaagaannggtgaacanntttttttttttttttttttttttttttttt

SEQ ID NO: 6793 - DNA, 84 bp, Artificial
  Barcode component
  misc_feature (33)..(34): n is a, c, g, or t
  misc_feature (43)..(44): n is a, c, g, or t
  misc_feature (53)..(54): n is a, c, g, or t
tttttttaagcagtggtatcaacgcagagtacnncggaagaannacatgcacnntttttttttttttttttttttttttttttt

SEQ ID NO: 6794 - DNA, 84 bp, Artificial
  Barcode component
  misc_feature (33)..(34): n is a, c, g, or t
  misc_feature (43)..(44): n is a, c, g, or t
  misc_feature (53)..(54): n is a, c, g, or t
tttttttaagcagtggtatcaacgcagagtacnncggaagaannccaacagtnntttttttttttttttttttttttttttttt

SEQ ID NO: 6795 - DNA, 84 bp, Artificial
  Barcode component
  misc_feature (33)..(34): n is a, c, g, or t
  misc_feature (43)..(44): n is a, c, g, or t
  misc_feature (53)..(54): n is a, c, g, or t
tttttttaagcagtggtatcaacgcagagtacnncggaagaannagaacagcnntttttttttttttttttttttttttttttt

SEQ ID NO: 6796 - DNA, 84 bp, Artificial
  Barcode component
  misc_feature (33)..(34): n is a, c, g, or t
  misc_feature (43)..(44): n is a, c, g, or t
  misc_feature (53)..(54): n is a, c, g, or t
tttttttaagcagtggtatcaacgcagagtacnncggaagaanngaacacgtnntttttttttttttttttttttttttttttt

SEQ ID NO: 6797 - DNA, 84 bp, Artificial
  Barcode component
  misc_feature (33)..(34): n is a, c, g, or t
  misc_feature (43)..(44): n is a, c, g, or t
  misc_feature (53)..(54): n is a, c, g, or t
tttttttaagcagtggtatcaacgcagagtacnncggaagaannggtcttcanntttttttttttttttttttttttttttttt

SEQ ID NO: 6798 - DNA, 84 bp, Artificial
  Barcode component
  misc_feature (33)..(34): n is a, c, g, or t
  misc_feature (43)..(44): n is a, c, g, or t
  misc_feature (53)..(54): n is a, c, g, or t
tttttttaagcagtggtatcaacgcagagtacnncggaagaannaggttcagnntttttttttttttttttttttttttttttt

SEQ ID NO: 6799 - DNA, 84 bp, Artificial
  Barcode component
  misc_feature (33)..(34): n is a, c, g, or t
  misc_feature (43)..(44): n is a, c, g, or t
  misc_feature (53)..(54): n is a, c, g, or t
tttttttaagcagtggtatcaacgcagagtacnncggaagaannctagagcanntttttttttttttttttttttttttttttt

SEQ ID NO: 6800 - DNA, 84 bp, Artificial
  Barcode component
  misc_feature (33)..(34): n is a, c, g, or t
  misc_feature (43)..(44): n is a, c, g, or t
  misc_feature (53)..(54): n is a, c, g, or t
tttttttaagcagtggtatcaacgcagagtacnncggaagaanncttctagcnntttttttttttttttttttttttttttttt

SEQ ID NO: 6801 - DNA, 84 bp, Artificial
  Barcode component
  misc_feature (33)..(34): n is a, c, g, or t
  misc_feature (43)..(44): n is a, c, g, or t
  misc_feature (53)..(54): n is a, c, g, or t
tttttttaagcagtggtatcaacgcagagtacnncggaagaanngagtaacgnntttttttttttttttttttttttttttttt

SEQ ID NO: 6802 - DNA, 84 bp, Artificial
  Barcode component
  misc_feature (33)..(34): n is a, c, g, or t
  misc_feature (43)..(44): n is a, c, g, or t
  misc_feature (53)..(54): n is a, c, g, or t
tttttttaagcagtggtatcaacgcagagtacnncggaagaannctaagaggnntttttttttttttttttttttttttttttt

SEQ ID NO: 6803 - DNA, 84 bp, Artificial
  Barcode component
  misc_feature (33)..(34): n is a, c, g, or t
  misc_feature (43)..(44): n is a, c, g, or t
  misc_feature (53)..(54): n is a, c, g, or t
tttttttaagcagtggtatcaacgcagagtacnncggaagaannacgtgtagnntttttttttttttttttttttttttttttt

SEQ ID NO: 6804 - DNA, 84 bp, Artificial
  Barcode component
  misc_feature (33)..(34): n is a, c, g, or t
  misc_feature (43)..(44): n is a, c, g, or t
  misc_feature (53)..(54): n is a, c, g, or t
tttttttaagcagtggtatcaacgcagagtacnncggaagaannactacaggnntttttttttttttttttttttttttttttt

SEQ ID NO: 6805 - DNA, 84 bp, Artificial
  Barcode component
  misc_feature (33)..(34): n is a, c, g, or t
  misc_feature (43)..(44): n is a, c, g, or t
  misc_feature (53)..(54): n is a, c, g, or t
tttttttaagcagtggtatcaacgcagagtacnncggaagaanntacaggtcnntttttttttttttttttttttttttttttt

SEQ ID NO: 6806 - DNA, 84 bp, Artificial
  Barcode component
  misc_feature (33)..(34): n is a, c, g, or t
  misc_feature (43)..(44): n is a, c, g, or t
  misc_feature (53)..(54): n is a, c, g, or t
tttttttaagcagtggtatcaacgcagagtacnncggaagaannctcacatgnntttttttttttttttttttttttttttttt

SEQ ID NO: 6807 - DNA, 84 bp, Artificial
  Barcode component
  misc_feature (33)..(34): n is a, c, g, or t
  misc_feature (43)..(44): n is a, c, g, or t
  misc_feature (53)..(54): n is a, c, g, or t
tttttttaagcagtggtatcaacgcagagtacnncggaagaannactaggagnntttttttttttttttttttttttttttttt

SEQ ID NO: 6808 - DNA, 84 bp, Artificial
  Barcode component
  misc_feature (33)..(34): n is a, c, g, or t
  misc_feature (43)..(44): n is a, c, g, or t
  misc_feature (53)..(54): n is a, c, g, or t
tttttttaagcagtggtatcaacgcagagtacnncggaagaannccatagganntttttttttttttttttttttttttttttt

SEQ ID NO: 6809 - DNA, 84 bp, Artificial
  Barcode component
  misc_feature (33)..(34): n is a, c, g, or t
  misc_feature (43)..(44): n is a, c, g, or t
  misc_feature (53)..(54): n is a, c, g, or t
tttttttaagcagtggtatcaacgcagagtacnncggaagaannggagaatcnntttttttttttttttttttttttttttttt

SEQ ID NO: 6810 - DNA, 84 bp, Artificial
  Barcode component
  misc_feature (33)..(34): n is a, c, g, or t
  misc_feature (43)..(44): n is a, c, g, or t
  misc_feature (53)..(54): n is a, c, g, or t
tttttttaagcagtggtatcaacgcagagtacnncggaagaanngccaagaanntttttttttttttttttttttttttttttt

SEQ ID NO: 6811 - DNA, 84 bp, Artificial
  Barcode component
  misc_feature (33)..(34): n is a, c, g, or t
  misc_feature (43)..(44): n is a, c, g, or t
  misc_feature (53)..(54): n is a, c, g, or t
tttttttaagcagtggtatcaacgcagagtacnncggaagaannaaggcaagnntttttttttttttttttttttttttttttt

SEQ ID NO: 6812 - DNA, 84 bp, Artificial
  Barcode component
  misc_feature (33)..(34): n is a, c, g, or t
  misc_feature (43)..(44): n is a, c, g, or t
  misc_feature (53)..(54): n is a, c, g, or t
tttttttaagcagtggtatcaacgcagagtacnncggaagaannaatgtcgcnntttttttttttttttttttttttttttttt

SEQ ID NO: 6813 - DNA, 84 bp, Artificial
  Barcode component
  misc_feature (33)..(34): n is a, c, g, or t
  misc_feature (43)..(44): n is a, c, g, or t
  misc_feature (53)..(54): n is a, c, g, or t
tttttttaagcagtggtatcaacgcagagtacnncggaagaannatggaaccnntttttttttttttttttttttttttttttt

SEQ ID NO: 6814 - DNA, 84 bp, Artificial
  Barcode component
  misc_feature (33)..(34): n is a, c, g, or t
  misc_feature (43)..(44): n is a, c, g, or t
  misc_feature (53)..(54): n is a, c, g, or t
tttttttaagcagtggtatcaacgcagagtacnncggaagaannagaggcatnntttttttttttttttttttttttttttttt

SEQ ID NO: 6815 - DNA, 84 bp, Artificial
  Barcode component
  misc_feature (33)..(34): n is a, c, g, or t
  misc_feature (43)..(44): n is a, c, g, or t
  misc_feature (53)..(54): n is a, c, g, or t
tttttttaagcagtggtatcaacgcagagtacnncggaagaanntgcatagcnntttttttttttttttttttttttttttttt

SEQ ID NO: 6816 - DNA, 84 bp, Artificial
  Barcode component
  misc_feature (33)..(34): n is a, c, g, or t
  misc_feature (43)..(44): n is a, c, g, or t
  misc_feature (53)..(54): n is a, c, g, or t
tttttttaagcagtggtatcaacgcagagtacnncggaagaannctaacgganntttttttttttttttttttttttttttttt

SEQ ID NO: 6817 - DNA, 84 bp, Artificial
  Barcode component
  misc_feature (33)..(34): n is a, c, g, or t
  misc_feature (43)..(44): n is a, c, g, or t
  misc_feature (53)..(54): n is a, c, g, or t
tttttttaagcagtggtatcaacgcagagtacnncggaagaanntatcgaggnntttttttttttttttttttttttttttttt

SEQ ID NO: 6818 - DNA, 84 bp, Artificial
  Barcode component
  misc_feature (33)..(34): n is a, c, g, or t
  misc_feature (43)..(44): n is a, c, g, or t
  misc_feature (53)..(54): n is a, c, g, or t
tttttttaagcagtggtatcaacgcagagtacnncggaagaanncatagcctnntttttttttttttttttttttttttttttt

SEQ ID NO: 6819 - DNA, 84 bp, Artificial
  Barcode component
  misc_feature (33)..(34): n is a, c, g, or t
  misc_feature (43)..(44): n is a, c, g, or t
  misc_feature (53)..(54): n is a, c, g, or t
tttttttaagcagtggtatcaacgcagagtacnncggaagaannatcgagacnntttttttttttttttttttttttttttttt

SEQ ID NO: 6820 - DNA, 84 bp, Artificial
  Barcode component
  misc_feature (33)..(34): n is a, c, g, or t
  misc_feature (43)..(44): n is a, c, g, or t
  misc_feature (53)..(54): n is a, c, g, or t
tttttttaagcagtggtatcaacgcagagtacnncggaagaannggaagagtnntttttttttttttttttttttttttttttt

SEQ ID NO: 6821 - DNA, 84 bp, Artificial
  Barcode component
  misc_feature (33)..(34): n is a, c, g, or t
  misc_feature (43)..(44): n is a, c, g, or t
  misc_feature (53)..(54): n is a, c, g, or t
tttttttaagcagtggtatcaacgcagagtacnncggaagaannccaagtagnntttttttttttttttttttttttttttttt

SEQ ID NO: 6822 - DNA, 84 bp, Artificial
  Barcode component
  misc_feature (33)..(34): n is a, c, g, or t
  misc_feature (43)..(44): n is a, c, g, or t
  misc_feature (53)..(54): n is a, c, g, or t
tttttttaagcagtggtatcaacgcagagtacnncggaagaannctgaacagnntttttttttttttttttttttttttttttt

SEQ ID NO: 6823 - DNA, 84 bp, Artificial
  Barcode component
  misc_feature (33)..(34): n is a, c, g, or t
  misc_feature (43)..(44): n is a, c, g, or t
  misc_feature (53)..(54): n is a, c, g, or t
tttttttaagcagtggtatcaacgcagagtacnncggaagaanngtaggttcnntttttttttttttttttttttttttttttt

SEQ ID NO: 6824 - DNA, 84 bp, Artificial
  Barcode component
  misc_feature (33)..(34): n is a, c, g, or t
  misc_feature (43)..(44): n is a, c, g, or t
  misc_feature (53)..(54): n is a, c, g, or t
tttttttaagcagtggtatcaacgcagagtacnncggaagaanngtatggacnntttttttttttttttttttttttttttttt

SEQ ID NO: 6825 - DNA, 84 bp, Artificial
  Barcode component
  misc_feature (33)..(34): n is a, c, g, or t
  misc_feature (43)..(44): n is a, c, g, or t
  misc_feature (53)..(54): n is a, c, g, or t
tttttttaagcagtggtatcaacgcagagtacnncggaagaanntcgcaacanntttttttttttttttttttttttttttttt

SEQ ID NO: 6826 - DNA, 84 bp, Artificial
  Barcode component
  misc_feature (33)..(34): n is a, c, g, or t
  misc_feature (43)..(44): n is a, c, g, or t
  misc_feature (53)..(54): n is a, c, g, or t
tttttttaagcagtggtatcaacgcagagtacnncggaagaannccgctaatnntttttttttttttttttttttttttttttt

SEQ ID NO: 6827 - DNA, 84 bp, Artificial
  Barcode component
  misc_feature (33)..(34): n is a, c, g, or t
  misc_feature (43)..(44): n is a, c, g, or t
  misc_feature (53)..(54): n is a, c, g, or t
tttttttaagcagtggtatcaacgcagagtacnncggaagaanngattcgcanntttttttttttttttttttttttttttttt

SEQ ID NO: 6828 - DNA, 84 bp, Artificial
  Barcode component
  misc_feature (33)..(34): n is a, c, g, or t
  misc_feature (43)..(44): n is a, c, g, or t
  misc_feature (53)..(54): n is a, c, g, or t
tttttttaagcagtggtatcaacgcagagtacnncggaagaanncgatggaanntttttttttttttttttttttttttttttt

SEQ ID NO: 6829 - DNA, 84 bp, Artificial
  Barcode component
  misc_feature (33)..(34): n is a, c, g, or t
  misc_feature (43)..(44): n is a, c, g, or t
  misc_feature (53)..(54): n is a, c, g, or t
tttttttaagcagtggtatcaacgcagagtacnncggaagaannagcaagganntttttttttttttttttttttttttttttt

SEQ ID NO: 6830 - DNA, 84 bp, Artificial
  Barcode component
  misc_feature (33)..(34): n is a, c, g, or t
  misc_feature (43)..(44): n is a, c, g, or t
  misc_feature (53)..(54): n is a, c, g, or t
tttttttaagcagtggtatcaacgcagagtacnncggaagaanncgtagcaanntttttttttttttttttttttttttttttt

SEQ ID NO: 6831 - DNA, 84 bp, Artificial
  Barcode component
  misc_feature (33)..(34): n is a, c, g, or t
  misc_feature (43)..(44): n is a, c, g, or t
  misc_feature (53)..(54): n is a, c, g, or t
tttttttaagcagtggtatcaacgcagagtacnncggaagaanntggcagtanntttttttttttttttttttttttttttttt

SEQ ID NO: 6832 - DNA, 84 bp, Artificial
  Barcode component
  misc_feature (33)..(34): n is a, c, g, or t
  misc_feature (43)..(44): n is a, c, g, or t
  misc_feature (53)..(54): n is a, c, g, or t
tttttttaagcagtggtatcaacgcagagtacnncggaagaanncggtagttnntttttttttttttttttttttttttttttt

SEQ ID NO: 6833 - DNA, 84 bp, Artificial
  Barcode component
  misc_feature (33)..(34): n is a, c, g, or t
  misc_feature (43)..(44): n is a, c, g, or t
  misc_feature (53)..(54): n is a, c, g, or t
tttttttaagcagtggtatcaacgcagagtacnncggaagaanntgacttcgnntttttttttttttttttttttttttttttt

SEQ ID NO: 6834 - DNA, 84 bp, Artificial
  Barcode component
  misc_feature (33)..(34): n is a, c, g, or t
  misc_feature (43)..(44): n is a, c, g, or t
  misc_feature (53)..(54): n is a, c, g, or t
tttttttaagcagtggtatcaacgcagagtacnncggaagaanngagtgcaanntttttttttttttttttttttttttttttt

SEQ ID NO: 6835 - DNA, 84 bp, Artificial
  Barcode component
  misc_feature (33)..(34): n is a, c, g, or t
  misc_feature (43)..(44): n is a, c, g, or t
  misc_feature (53)..(54): n is a, c, g, or t
tttttttaagcagtggtatcaacgcagagtacnncggaagaannacggtaacnntttttttttttttttttttttttttttttt

SEQ ID NO: 6836 - DNA, 84 bp, Artificial
  Barcode component
  misc_feature (33)..(34): n is a, c, g, or t
  misc_feature (43)..(44): n is a, c, g, or t
  misc_feature (53)..(54): n is a, c, g, or t
tttttttaagcagtggtatcaacgcagagtacnncggaagaannaagtggtgnntttttttttttttttttttttttttttttt

SEQ ID NO: 6837 - DNA, 84 bp, Artificial
  Barcode component
  misc_feature (33)..(34): n is a, c, g, or t
  misc_feature (43)..(44): n is a, c, g, or t
  misc_feature (53)..(54): n is a, c, g, or t
tttttttaagcagtggtatcaacgcagagtacnncggaagaannggagacaanntttttttttttttttttttttttttttttt

SEQ ID NO: 6838 - DNA, 84 bp, Artificial
  Barcode component
  misc_feature (33)..(34): n is a, c, g, or t
  misc_feature (43)..(44): n is a, c, g, or t
  misc_feature (53)..(54): n is a, c, g, or t
tttttttaagcagtggtatcaacgcagagtacnncggaagaanntcaaggacnntttttttttttttttttttttttttttttt

SEQ ID NO: 6839 - DNA, 84 bp, Artificial
  Barcode component
  misc_feature (33)..(34): n is a, c, g, or t
  misc_feature (43)..(44): n is a, c, g, or t
  misc_feature (53)..(54): n is a, c, g, or t
tttttttaagcagtggtatcaacgcagagtacnncggaagaannaagagagcnntttttttttttttttttttttttttttttt

SEQ ID NO: 6840 - DNA, 84 bp, Artificial
  Barcode component
  misc_feature (33)..(34): n is a, c, g, or t
  misc_feature (43)..(44): n is a, c, g, or t
  misc_feature (53)..(54): n is a, c, g, or t
tttttttaagcagtggtatcaacgcagagtacnncggaagaanncgagagatnntttttttttttttttttttttttttttttt

SEQ ID NO: 6841 - DNA, 84 bp, Artificial
  Barcode component
  misc_feature (33)..(34): n is a, c, g, or t
  misc_feature (43)..(44): n is a, c, g, or t
  misc_feature (53)..(54): n is a, c, g, or t
tttttttaagcagtggtatcaacgcagagtacnncggaagaannacagatggnntttttttttttttttttttttttttttttt

SEQ ID NO: 6842 - DNA, 84 bp, Artificial
  Barcode component
  misc_feature (33)..(34): n is a, c, g, or t
  misc_feature (43)..(44): n is a, c, g, or t
  misc_feature (53)..(54): n is a, c, g, or t
tttttttaagcagtggtatcaacgcagagtacnncggaagaannaggagtcanntttttttttttttttttttttttttttttt

SEQ ID NO: 6843 - DNA, 84 bp, Artificial
  Barcode component
  misc_feature (33)..(34): n is a, c, g, or t
  misc_feature (43)..(44): n is a, c, g, or t
  misc_feature (53)..(54): n is a, c, g, or t
tttttttaagcagtggtatcaacgcagagtacnncggaagaanncgtgttacnntttttttttttttttttttttttttttttt

SEQ ID NO: 6844 - DNA, 84 bp, Artificial
  Barcode component
  misc_feature (33)..(34): n is a, c, g, or t
  misc_feature (43)..(44): n is a, c, g, or t
  misc_feature (53)..(54): n is a, c, g, or t
tttttttaagcagtggtatcaacgcagagtacnncggaagaanntagtgtgcnntttttttttttttttttttttttttttttt

SEQ ID NO: 6845 - DNA, 84 bp, Artificial
  Barcode component
  misc_feature (33)..(34): n is a, c, g, or t
  misc_feature (43)..(44): n is a, c, g, or t
  misc_feature (53)..(54): n is a, c, g, or t
tttttttaagcagtggtatcaacgcagagtacnncggaagaannctcatgacnntttttttttttttttttttttttttttttt

SEQ ID NO: 6846 - DNA, 84 bp, Artificial
  Barcode component
  misc_feature (33)..(34): n is a, c, g, or t
  misc_feature (43)..(44): n is a, c, g, or t
  misc_feature (53)..(54): n is a, c, g, or t
tttttttaagcagtggtatcaacgcagagtacnncggaagaanngtatccagnntttttttttttttttttttttttttttttt

SEQ ID NO: 6847 - DNA, 84 bp, Artificial
  Barcode component
  misc_feature (33)..(34): n is a, c, g, or t
  misc_feature (43)..(44): n is a, c, g, or t
  misc_feature (53)..(54): n is a, c, g, or t
tttttttaagcagtggtatcaacgcagagtacnncggaagaannacgcctatnntttttttttttttttttttttttttttttt

SEQ ID NO: 6848 - DNA, 84 bp, Artificial
  Barcode component
  misc_feature (33)..(34): n is a, c, g, or t
  misc_feature (43)..(44): n is a, c, g, or t
  misc_feature (53)..(54): n is a, c, g, or t
tttttttaagcagtggtatcaacgcagagtacnncggaagaannaacgacctnntttttttttttttttttttttttttttttt

SEQ ID NO: 6849 - DNA, 84 bp, Artificial
  Barcode component
  misc_feature (33)..(34): n is a, c, g, or t
  misc_feature (43)..(44): n is a, c, g, or t
  misc_feature (53)..(54): n is a, c, g, or t
tttttttaagcagtggtatcaacgcagagtacnncggaagaannatcaggctnntttttttttttttttttttttttttttttt

SEQ ID NO: 6850 - DNA, 84 bp, Artificial
  Barcode component
  misc_feature (33)..(34): n is a, c, g, or t
  misc_feature (43)..(44): n is a, c, g, or t
  misc_feature (53)..(54): n is a, c, g, or t
tttttttaagcagtggtatcaacgcagagtacnncggaagaanncaagttcgnntttttttttttttttttttttttttttttt

SEQ ID NO: 6851 - DNA, 84 bp, Artificial
  Barcode component
  misc_feature (33)..(34): n is a, c, g, or t
  misc_feature (43)..(44): n is a, c, g, or t
  misc_feature (53)..(54): n is a, c, g, or t
tttttttaagcagtggtatcaacgcagagtacnncggaagaanntagccaganntttttttttttttttttttttttttttttt

SEQ ID NO: 6852 - DNA, 84 bp, Artificial
  Barcode component
  misc_feature (33)..(34): n is a, c, g, or t
  misc_feature (43)..(44): n is a, c, g, or t
  misc_feature (53)..(54): n is a, c, g, or t
tttttttaagcagtggtatcaacgcagagtacnncggaagaanncaatcacgnntttttttttttttttttttttttttttttt

SEQ ID NO: 6853 - DNA, 84 bp, Artificial
  Barcode component
  misc_feature (33)..(34): n is a, c, g, or t
  misc_feature (43)..(44): n is a, c, g, or t
  misc_feature (53)..(54): n is a, c, g, or t
tttttttaagcagtggtatcaacgcagagtacnncggaagaanngcaacaagnntttttttttttttttttttttttttttttt

SEQ ID NO: 6854 - DNA, 84 bp, Artificial
  Barcode component
  misc_feature (33)..(34): n is a, c, g, or t
  misc_feature (43)..(44): n is a, c, g, or t
  misc_feature (53)..(54): n is a, c, g, or t
tttttttaagcagtggtatcaacgcagagtacnncggaagaanncacgacaanntttttttttttttttttttttttttttttt

SEQ ID NO: 6855 - DNA, 84 bp, Artificial
  Barcode component
  misc_feature (33)..(34): n is a, c, g, or t
  misc_feature (43)..(44): n is a, c, g, or t
  misc_feature (53)..(54): n is a, c, g, or t
tttttttaagcagtggtatcaacgcagagtacnncggaagaanntacggaganntttttttttttttttttttttttttttttt

SEQ ID NO: 6856 - DNA, 84 bp, Artificial
  Barcode component
  misc_feature (33)..(34): n is a, c, g, or t
  misc_feature (43)..(44): n is a, c, g, or t
  misc_feature (53)..(54): n is a, c, g, or t
tttttttaagcagtggtatcaacgcagagtacnncggaagaanncgacaaganntttttttttttttttttttttttttttttt

SEQ ID NO: 6857 - DNA, 84 bp, Artificial
  Barcode component
  misc_feature (33)..(34): n is a, c, g, or t
  misc_feature (43)..(44): n is a, c, g, or t
  misc_feature (53)..(54): n is a, c, g, or t
tttttttaagcagtggtatcaacgcagagtacnncggaagaanncgaagtganntttttttttttttttttttttttttttttt

SEQ ID NO: 6858 - DNA, 84 bp, Artificial
  Barcode component
  misc_feature (33)..(34): n is a, c, g, or t
  misc_feature (43)..(44): n is a, c, g, or t
  misc_feature (53)..(54): n is a, c, g, or t
tttttttaagcagtggtatcaacgcagagtacnncggaagaannagctggtanntttttttttttttttttttttttttttttt

SEQ ID NO: 6859 - DNA, 84 bp, Artificial
  Barcode component
  misc_feature (33)..(34): n is a, c, g, or t
  misc_feature (43)..(44): n is a, c, g, or t
  misc_feature (53)..(54): n is a, c, g, or t
tttttttaagcagtggtatcaacgcagagtacnncggaagaannaactaggcnntttttttttttttttttttttttttttttt

SEQ ID NO: 6860 - DNA, 84 bp, Artificial
  Barcode component
  misc_feature (33)..(34): n is a, c, g, or t
  misc_feature (43)..(44): n is a, c, g, or t
  misc_feature (53)..(54): n is a, c, g, or t
tttttttaagcagtggtatcaacgcagagtacnncggaagaanncagcaagtnntttttttttttttttttttttttttttttt

SEQ ID NO: 6861 - DNA, 84 bp, Artificial
  Barcode component
  misc_feature (33)..(34): n is a, c, g, or t
  misc_feature (43)..(44): n is a, c, g, or t
  misc_feature (53)..(54): n is a, c, g, or t
tttttttaagcagtggtatcaacgcagagtacnncggaagaannacgaggtanntttttttttttttttttttttttttttttt

SEQ ID NO: 6862 - DNA, 84 bp, Artificial
  Barcode component
  misc_feature (33)..(34): n is a, c, g, or t
  misc_feature (43)..(44): n is a, c, g, or t
  misc_feature (53)..(54): n is a, c, g, or t
tttttttaagcagtggtatcaacgcagagtacnncggaagaanncatcttccnntttttttttttttttttttttttttttttt

SEQ ID NO: 6863 - DNA, 84 bp, Artificial
  Barcode component
  misc_feature (33)..(34): n is a, c, g, or t
  misc_feature (43)..(44): n is a, c, g, or t
  misc_feature (53)..(54): n is a, c, g, or t
tttttttaagcagtggtatcaacgcagagtacnncggaagaanncctgaatcnntttttttttttttttttttttttttttttt

SEQ ID NO: 6864 - DNA, 84 bp, Artificial
  Barcode component
  misc_feature (33)..(34): n is a, c, g, or t
  misc_feature (43)..(44): n is a, c, g, or t
  misc_feature (53)..(54): n is a, c, g, or t
tttttttaagcagtggtatcaacgcagagtacnncggaagaanntgcagactnntttttttttttttttttttttttttttttt

SEQ ID NO: 6865 - DNA, 84 bp, Artificial
  Barcode component
  misc_feature (33)..(34): n is a, c, g, or t
  misc_feature (43)..(44): n is a, c, g, or t
  misc_feature (53)..(54): n is a, c, g, or t
tttttttaagcagtggtatcaacgcagagtacnncggaagaannagatgtggnntttttttttttttttttttttttttttttt

SEQ ID NO: 6866 - DNA, 84 bp, Artificial
  Barcode component
  misc_feature (33)..(34): n is a, c, g, or t
  misc_feature (43)..(44): n is a, c, g, or t
  misc_feature (53)..(54): n is a, c, g, or t
tttttttaagcagtggtatcaacgcagagtacnncggaagaannagttcgacnntttttttttttttttttttttttttttttt

SEQ ID NO: 6867 - DNA, 84 bp, Artificial
  Barcode component
  misc_feature (33)..(34): n is a, c, g, or t
  misc_feature (43)..(44): n is a, c, g, or t
  misc_feature (53)..(54): n is a, c, g, or t
tttttttaagcagtggtatcaacgcagagtacnncggaagaannacaacctcnntttttttttttttttttttttttttttttt

SEQ ID NO: 6868 - DNA, 84 bp, Artificial
  Barcode component
  misc_feature (33)..(34): n is a, c, g, or t
  misc_feature (43)..(44): n is a, c, g, or t
  misc_feature (53)..(54): n is a, c, g, or t
tttttttaagcagtggtatcaacgcagagtacnncggaagaanncatggtagnntttttttttttttttttttttttttttttt

SEQ ID NO: 6869 - DNA, 84 bp, Artificial
  Barcode component
  misc_feature (33)..(34): n is a, c, g, or t
  misc_feature (43)..(44): n is a, c, g, or t
  misc_feature (53)..(54): n is a, c, g, or t
tttttttaagcagtggtatcaacgcagagtacnncggaagaanncgtatctcnntttttttttttttttttttttttttttttt

SEQ ID NO: 6870 - DNA, 84 bp, Artificial
  Barcode component
  misc_feature (33)..(34): n is a, c, g, or t
  misc_feature (43)..(44): n is a, c, g, or t
  misc_feature (53)..(54): n is a, c, g, or t
tttttttaagcagtggtatcaacgcagagtacnncggaagaanncctagttcnntttttttttttttttttttttttttttttt

SEQ ID NO: 6871 - DNA, 84 bp, Artificial
  Barcode component
  misc_feature (33)..(34): n is a, c, g, or t
  misc_feature (43)..(44): n is a, c, g, or t
  misc_feature (53)..(54): n is a, c, g, or t
tttttttaagcagtggtatcaacgcagagtacnncggaagaanncaagagtcnntttttttttttttttttttttttttttttt

SEQ ID NO: 6872 - DNA, 84 bp, Artificial
  Barcode component
  misc_feature (33)..(34): n is a, c, g, or t
  misc_feature (43)..(44): n is a, c, g, or t
  misc_feature (53)..(54): n is a, c, g, or t
tttttttaagcagtggtatcaacgcagagtacnnattggtgcnnaatcggcanntttttttttttttttttttttttttttttt

SEQ ID NO: 6873 - DNA, 84 bp, Artificial
  Barcode component
  misc_feature (33)..(34): n is a, c, g, or t
  misc_feature (43)..(44): n is a, c, g, or t
  misc_feature (53)..(54): n is a, c, g, or t
tttttttaagcagtggtatcaacgcagagtacnnattggtgcnntacggcatnntttttttttttttttttttttttttttttt

SEQ ID NO: 6874 - DNA, 84 bp, Artificial
  Barcode component
  misc_feature (33)..(34): n is a, c, g, or t
  misc_feature (43)..(44): n is a, c, g, or t
  misc_feature (53)..(54): n is a, c, g, or t
tttttttaagcagtggtatcaacgcagagtacnnattggtgcnnttggatcgnntttttttttttttttttttttttttttttt

SEQ ID NO: 6875 - DNA, 84 bp, Artificial
  Barcode component
  misc_feature (33)..(34): n is a, c, g, or t
  misc_feature (43)..(44): n is a, c, g, or t
  misc_feature (53)..(54): n is a, c, g, or t
tttttttaagcagtggtatcaacgcagagtacnnattggtgcnntggaacganntttttttttttttttttttttttttttttt

SEQ ID NO: 6876 - DNA, 84 bp, Artificial
  Barcode component
  misc_feature (33)..(34): n is a, c, g, or t
  misc_feature (43)..(44): n is a, c, g, or t
  misc_feature (53)..(54): n is a, c, g, or t
tttttttaagcagtggtatcaacgcagagtacnnattggtgcnnggcaatcanntttttttttttttttttttttttttttttt

SEQ ID NO: 6877 - DNA, 84 bp, Artificial
  Barcode component
  misc_feature (33)..(34): n is a, c, g, or t
  misc_feature (43)..(44): n is a, c, g, or t
  misc_feature (53)..(54): n is a, c, g, or t
tttttttaagcagtggtatcaacgcagagtacnnattggtgcnngaatccganntttttttttttttttttttttttttttttt

SEQ ID NO: 6878 - DNA, 84 bp, Artificial
  Barcode component
  misc_feature (33)..(34): n is a, c, g, or t
  misc_feature (43)..(44): n is a, c, g, or t
  misc_feature (53)..(54): n is a, c, g, or t
tttttttaagcagtggtatcaacgcagagtacnnattggtgcnnttacggtgnntttttttttttttttttttttttttttttt

SEQ ID NO: 6879 - DNA, 84 bp, Artificial
  Barcode component
  misc_feature (33)..(34): n is a, c, g, or t
  misc_feature (43)..(44): n is a, c, g, or t
  misc_feature (53)..(54): n is a, c, g, or t
tttttttaagcagtggtatcaacgcagagtacnnattggtgcnncatatcggnntttttttttttttttttttttttttttttt

SEQ ID NO: 6880 - DNA, 84 bp, Artificial
  Barcode component
  misc_feature (33)..(34): n is a, c, g, or t
  misc_feature (43)..(44): n is a, c, g, or t
  misc_feature (53)..(54): n is a, c, g, or t
tttttttaagcagtggtatcaacgcagagtacnnattggtgcnncttcggtanntttttttttttttttttttttttttttttt

SEQ ID NO: 6881 - DNA, 84 bp, Artificial
  Barcode component
  misc_feature (33)..(34): n is a, c, g, or t
  misc_feature (43)..(44): n is a, c, g, or t
  misc_feature (53)..(54): n is a, c, g, or t
tttttttaagcagtggtatcaacgcagagtacnnattggtgcnntcctaacgnntttttttttttttttttttttttttttttt

SEQ ID NO: 6882 - DNA, 84 bp, Artificial
  Barcode component
  misc_feature (33)..(34): n is a, c, g, or t
  misc_feature (43)..(44): n is a, c, g, or t
  misc_feature (53)..(54): n is a, c, g, or t
tttttttaagcagtggtatcaacgcagagtacnnattggtgcnngtaagccanntttttttttttttttttttttttttttttt

SEQ ID NO: 6883 - DNA, 84 bp, Artificial
  Barcode component
  misc_feature (33)..(34): n is a, c, g, or t
  misc_feature (43)..(44): n is a, c, g, or t
  misc_feature (53)..(54): n is a, c, g, or t
tttttttaagcagtggtatcaacgcagagtacnnattggtgcnntaaggtggnntttttttttttttttttttttttttttttt

SEQ ID NO: 6884 - DNA, 84 bp, Artificial
  Barcode component
  misc_feature (33)..(34): n is a, c, g, or t
  misc_feature (43)..(44): n is a, c, g, or t
  misc_feature (53)..(54): n is a, c, g, or t
tttttttaagcagtggtatcaacgcagagtacnnattggtgcnnggtaagctnntttttttttttttttttttttttttttttt

SEQ ID NO: 6885 - DNA, 84 bp, Artificial
  Barcode component
  misc_feature (33)..(34): n is a, c, g, or t
  misc_feature (43)..(44): n is a, c, g, or t
  misc_feature (53)..(54): n is a, c, g, or t
tttttttaagcagtggtatcaacgcagagtacnnattggtgcnntgtgtcganntttttttttttttttttttttttttttttt

SEQ ID NO: 6886 - DNA, 84 bp, Artificial
  Barcode component
  misc_feature (33)..(34): n is a, c, g, or t
  misc_feature (43)..(44): n is a, c, g, or t
  misc_feature (53)..(54): n is a, c, g, or t
tttttttaagcagtggtatcaacgcagagtacnnattggtgcnngagcatganntttttttttttttttttttttttttttttt

SEQ ID NO: 6887 - DNA, 84 bp, Artificial
  Barcode component
  misc_feature (33)..(34): n is a, c, g, or t
  misc_feature (43)..(44): n is a, c, g, or t
  misc_feature (53)..(54): n is a, c, g, or t
tttttttaagcagtggtatcaacgcagagtacnnattggtgcnntcgaagtcnntttttttttttttttttttttttttttttt

SEQ ID NO: 6888 - DNA, 84 bp, Artificial
  Barcode component
  misc_feature (33)..(34): n is a, c, g, or t
  misc_feature (43)..(44): n is a, c, g, or t
  misc_feature (53)..(54): n is a, c, g, or t
tttttttaagcagtggtatcaacgcagagtacnnattggtgcnnggtgaacanntttttttttttttttttttttttttttttt

SEQ ID NO: 6889 - DNA, 84 bp, Artificial
  Barcode component
  misc_feature (33)..(34): n is a, c, g, or t
  misc_feature (43)..(44): n is a, c, g, or t
  misc_feature (53)..(54): n is a, c, g, or t
tttttttaagcagtggtatcaacgcagagtacnnattggtgcnnacatgcacnntttttttttttttttttttttttttttttt

SEQ ID NO: 6890 - DNA, 84 bp, Artificial
  Barcode component
  misc_feature (33)..(34): n is a, c, g, or t
  misc_feature (43)..(44): n is a, c, g, or t
  misc_feature (53)..(54): n is a, c, g, or t
tttttttaagcagtggtatcaacgcagagtacnnattggtgcnnccaacagtnntttttttttttttttttttttttttttttt

SEQ ID NO: 6891 - DNA, 84 bp, Artificial
  Barcode component
  misc_feature (33)..(34): n is a, c, g, or t
  misc_feature (43)..(44): n is a, c, g, or t
  misc_feature (53)..(54): n is a, c, g, or t
tttttttaagcagtggtatcaacgcagagtacnnattggtgcnnagaacagcnntttttttttttttttttttttttttttttt

SEQ ID NO: 6892 - DNA, 84 bp, Artificial
  Barcode component
  misc_feature (33)..(34): n is a, c, g, or t
  misc_feature (43)..(44): n is a, c, g, or t
  misc_feature (53)..(54): n is a, c, g, or t
tttttttaagcagtggtatcaacgcagagtacnnattggtgcnngaacacgtnntttttttttttttttttttttttttttttt

SEQ ID NO: 6893 - DNA, 84 bp, Artificial
  Barcode component
  misc_feature (33)..(34): n is a, c, g, or t
  misc_feature (43)..(44): n is a, c, g, or t
  misc_feature (53)..(54): n is a, c, g, or t
tttttttaagcagtggtatcaacgcagagtacnnattggtgcnnggtcttcanntttttttttttttttttttttttttttttt

SEQ ID NO: 6894 - DNA, 84 bp, Artificial
  Barcode component
  misc_feature (33)..(34): n is a, c, g, or t
  misc_feature (43)..(44): n is a, c, g, or t
  misc_feature (53)..(54): n is a, c, g, or t
tttttttaagcagtggtatcaacgcagagtacnnattggtgcnnaggttcagnntttttttttttttttttttttttttttttt

SEQ ID NO: 6895 - DNA, 84 bp, Artificial
  Barcode component
  misc_feature (33)..(34): n is a, c, g, or t
  misc_feature (43)..(44): n is a, c, g, or t
  misc_feature (53)..(54): n is a, c, g, or t
tttttttaagcagtggtatcaacgcagagtacnnattggtgcnnctagagcanntttttttttttttttttttttttttttttt

SEQ ID NO: 6896 - DNA, 84 bp, Artificial
  Barcode component
  misc_feature (33)..(34): n is a, c, g, or t
  misc_feature (43)..(44): n is a, c, g, or t
  misc_feature (53)..(54): n is a, c, g, or t
tttttttaagcagtggtatcaacgcagagtacnnattggtgcnncttctagcnntttttttttttttttttttttttttttttt

SEQ ID NO: 6897 - DNA, 84 bp, Artificial
  Barcode component
  misc_feature (33)..(34): n is a, c, g, or t
  misc_feature (43)..(44): n is a, c, g, or t
  misc_feature (53)..(54): n is a, c, g, or t
tttttttaagcagtggtatcaacgcagagtacnnattggtgcnngagtaacgnntttttttttttttttttttttttttttttt

SEQ ID NO: 6898 - DNA, 84 bp, Artificial
  Barcode component
  misc_feature (33)..(34): n is a, c, g, or t
  misc_feature (43)..(44): n is a, c, g, or t
  misc_feature (53)..(54): n is a, c, g, or t
tttttttaagcagtggtatcaacgcagagtacnnattggtgcnnctaagaggnntttttttttttttttttttttttttttttt

SEQ ID NO: 6899 - DNA, 84 bp, Artificial
  Barcode component
  misc_feature (33)..(34): n is a, c, g, or t
  misc_feature (43)..(44): n is a, c, g, or t
  misc_feature (53)..(54): n is a, c, g, or t
tttttttaagcagtggtatcaacgcagagtacnnattggtgcnnacgtgtagnntttttttttttttttttttttttttttttt

SEQ ID NO: 6900 - DNA, 84 bp, Artificial
  Barcode component
  misc_feature (33)..(34): n is a, c, g, or t
  misc_feature (43)..(44): n is a, c, g, or t
  misc_feature (53)..(54): n is a, c, g, or t
tttttttaagcagtggtatcaacgcagagtacnnattggtgcnnactacaggnntttttttttttttttttttttttttttttt

SEQ ID NO: 6901 - DNA, 84 bp, Artificial
  Barcode component
  misc_feature (33)..(34): n is a, c, g, or t
  misc_feature (43)..(44): n is a, c, g, or t
  misc_feature (53)..(54): n is a, c, g, or t
tttttttaagcagtggtatcaacgcagagtacnnattggtgcnntacaggtcnntttttttttttttttttttttttttttttt

SEQ ID NO: 6902 - DNA, 84 bp, Artificial
  Barcode component
  misc_feature (33)..(34): n is a, c, g, or t
  misc_feature (43)..(44): n is a, c, g, or t
  misc_feature (53)..(54): n is a, c, g, or t
tttttttaagcagtggtatcaacgcagagtacnnattggtgcnnctcacatgnntttttttttttttttttttttttttttttt

SEQ ID NO: 6903 - DNA, 84 bp, Artificial
  Barcode component
  misc_feature (33)..(34): n is a, c, g, or t
  misc_feature (43)..(44): n is a, c, g, or t
  misc_feature (53)..(54): n is a, c, g, or t
tttttttaagcagtggtatcaacgcagagtacnnattggtgcnnactaggagnntttttttttttttttttttttttttttttt

SEQ ID NO: 6904 - DNA, 84 bp, Artificial
  Barcode component
  misc_feature (33)..(34): n is a, c, g, or t
  misc_feature (43)..(44): n is a, c, g, or t
  misc_feature (53)..(54): n is a, c, g, or t
tttttttaagcagtggtatcaacgcagagtacnnattggtgcnnccatagganntttttttttttttttttttttttttttttt

SEQ ID NO: 6905 - DNA, 84 bp, Artificial
  Barcode component
  misc_feature (33)..(34): n is a, c, g, or t
  misc_feature (43)..(44): n is a, c, g, or t
  misc_feature (53)..(54): n is a, c, g, or t
tttttttaagcagtggtatcaacgcagagtacnnattggtgcnnggagaatcnntttttttttttttttttttttttttttttt

SEQ ID NO: 6906 - DNA, 84 bp, Artificial
  Barcode component
  misc_feature (33)..(34): n is a, c, g, or t
  misc_feature (43)..(44): n is a, c, g, or t
  misc_feature (53)..(54): n is a, c, g, or t
tttttttaagcagtggtatcaacgcagagtacnnattggtgcnngccaagaanntttttttttttttttttttttttttttttt

SEQ ID NO: 6907 - DNA, 84 bp, Artificial
  Barcode component
  misc_feature (33)..(34): n is a, c, g, or t
  misc_feature (43)..(44): n is a, c, g, or t
  misc_feature (53)..(54): n is a, c, g, or t
tttttttaagcagtggtatcaacgcagagtacnnattggtgcnnaaggcaagnntttttttttttttttttttttttttttttt

SEQ ID NO: 6908 - DNA, 84 bp, Artificial
  Barcode component
  misc_feature (33)..(34): n is a, c, g, or t
  misc_feature (43)..(44): n is a, c, g, or t
  misc_feature (53)..(54): n is a, c, g, or t
tttttttaagcagtggtatcaacgcagagtacnnattggtgcnnaatgtcgcnntttttttttttttttttttttttttttttt

SEQ ID NO: 6909 - DNA, 84 bp, Artificial
  Barcode component
  misc_feature (33)..(34): n is a, c, g, or t
  misc_feature (43)..(44): n is a, c, g, or t
  misc_feature (53)..(54): n is a, c, g, or t
tttttttaagcagtggtatcaacgcagagtacnnattggtgcnnatggaaccnntttttttttttttttttttttttttttttt

SEQ ID NO: 6910 - DNA, 84 bp, Artificial
  Barcode component
  misc_feature (33)..(34): n is a, c, g, or t
  misc_feature (43)..(44): n is a, c, g, or t
  misc_feature (53)..(54): n is a, c, g, or t
tttttttaagcagtggtatcaacgcagagtacnnattggtgcnnagaggcatnntttttttttttttttttttttttttttttt

SEQ ID NO: 6911 - DNA, 84 bp, Artificial
  Barcode component
  misc_feature (33)..(34): n is a, c, g, or t
  misc_feature (43)..(44): n is a, c, g, or t
  misc_feature (53)..(54): n is a, c, g, or t
tttttttaagcagtggtatcaacgcagagtacnnattggtgcnntgcatagcnntttttttttttttttttttttttttttttt

SEQ ID NO: 6912 - DNA, 84 bp, Artificial
  Barcode component
  misc_feature (33)..(34): n is a, c, g, or t
  misc_feature (43)..(44): n is a, c, g, or t
  misc_feature (53)..(54): n is a, c, g, or t
tttttttaagcagtggtatcaacgcagagtacnnattggtgcnnctaacgganntttttttttttttttttttttttttttttt

SEQ ID NO: 6913 - DNA, 84 bp, Artificial
  Barcode component
  misc_feature (33)..(34): n is a, c, g, or t
  misc_feature (43)..(44): n is a, c, g, or t
  misc_feature (53)..(54): n is a, c, g, or t
tttttttaagcagtggtatcaacgcagagtacnnattggtgcnntatcgaggnntttttttttttttttttttttttttttttt

SEQ ID NO: 6914 - DNA, 84 bp, Artificial
  Barcode component
  misc_feature (33)..(34): n is a, c, g, or t
  misc_feature (43)..(44): n is a, c, g, or t
  misc_feature (53)..(54): n is a, c, g, or t
tttttttaagcagtggtatcaacgcagagtacnnattggtgcnncatagcctnntttttttttttttttttttttttttttttt

SEQ ID NO: 6915 - DNA, 84 bp, Artificial
  Barcode component
  misc_feature (33)..(34): n is a, c, g, or t
  misc_feature (43)..(44): n is a, c, g, or t
  misc_feature (53)..(54): n is a, c, g, or t
tttttttaagcagtggtatcaacgcagagtacnnattggtgcnnatcgagacnntttttttttttttttttttttttttttttt

SEQ ID NO: 6916 - DNA, 84 bp, Artificial
  Barcode component
  misc_feature (33)..(34): n is a, c, g, or t
  misc_feature (43)..(44): n is a, c, g, or t
  misc_feature (53)..(54): n is a, c, g, or t
tttttttaagcagtggtatcaacgcagagtacnnattggtgcnnggaagagtnntttttttttttttttttttttttttttttt

SEQ ID NO: 6917 - DNA, 84 bp, Artificial
  Barcode component
  misc_feature (33)..(34): n is a, c, g, or t
  misc_feature (43)..(44): n is a, c, g, or t
  misc_feature (53)..(54): n is a, c, g, or t
tttttttaagcagtggtatcaacgcagagtacnnattggtgcnnccaagtagnntttttttttttttttttttttttttttttt

SEQ ID NO: 6918 - DNA, 84 bp, Artificial
  Barcode component
  misc_feature (33)..(34): n is a, c, g, or t
  misc_feature (43)..(44): n is a, c, g, or t
  misc_feature (53)..(54): n is a, c, g, or t
tttttttaagcagtggtatcaacgcagagtacnnattggtgcnnctgaacagnntttttttttttttttttttttttttttttt

SEQ ID NO: 6919 - DNA, 84 bp, Artificial
  Barcode component
  misc_feature (33)..(34): n is a, c, g, or t
  misc_feature (43)..(44): n is a, c, g, or t
  misc_feature (53)..(54): n is a, c, g, or t
tttttttaagcagtggtatcaacgcagagtacnnattggtgcnngtaggttcnntttttttttttttttttttttttttttttt

SEQ ID NO: 6920 - DNA, 84 bp, Artificial
  Barcode component
  misc_feature (33)..(34): n is a, c, g, or t
  misc_feature (43)..(44): n is a, c, g, or t
  misc_feature (53)..(54): n is a, c, g, or t
tttttttaagcagtggtatcaacgcagagtacnnattggtgcnngtatggacnntttttttttttttttttttttttttttttt

SEQ ID NO: 6921 - DNA, 84 bp, Artificial
  Barcode component
  misc_feature (33)..(34): n is a, c, g, or t
  misc_feature (43)..(44): n is a, c, g, or t
  misc_feature (53)..(54): n is a, c, g, or t
tttttttaagcagtggtatcaacgcagagtacnnattggtgcnntcgcaacanntttttttttttttttttttttttttttttt

SEQ ID NO: 6922 - DNA, 84 bp, Artificial
  Barcode component
  misc_feature (33)..(34): n is a, c, g, or t
  misc_feature (43)..(44): n is a, c, g, or t
  misc_feature (53)..(54): n is a, c, g, or t
tttttttaagcagtggtatcaacgcagagtacnnattggtgcnnccgctaatnntttttttttttttttttttttttttttttt

SEQ ID NO: 6923 - DNA, 84 bp, Artificial
  Barcode component
  misc_feature (33)..(34): n is a, c, g, or t
  misc_feature (43)..(44): n is a, c, g, or t
  misc_feature (53)..(54): n is a, c, g, or t
tttttttaagcagtggtatcaacgcagagtacnnattggtgcnngattcgcanntttttttttttttttttttttttttttttt

SEQ ID NO: 6924 - DNA, 84 bp, Artificial
  Barcode component
  misc_feature (33)..(34): n is a, c, g, or t
  misc_feature (43)..(44): n is a, c, g, or t
  misc_feature (53)..(54): n is a, c, g, or t
tttttttaagcagtggtatcaacgcagagtacnnattggtgcnncgatggaanntttttttttttttttttttttttttttttt

SEQ ID NO: 6925 - DNA, 84 bp, Artificial
  Barcode component
  misc_feature (33)..(34): n is a, c, g, or t
  misc_feature (43)..(44): n is a, c, g, or t
  misc_feature (53)..(54): n is a, c, g, or t
tttttttaagcagtggtatcaacgcagagtacnnattggtgcnnagcaagganntttttttttttttttttttttttttttttt

SEQ ID NO: 6926 - DNA, 84 bp, Artificial
  Barcode component
  misc_feature (33)..(34): n is a, c, g, or t
  misc_feature (43)..(44): n is a, c, g, or t
  misc_feature (53)..(54): n is a, c, g, or t
tttttttaagcagtggtatcaacgcagagtacnnattggtgcnncgtagcaanntttttttttttttttttttttttttttttt

SEQ ID NO: 6927 - DNA, 84 bp, Artificial
  Barcode component
  misc_feature (33)..(34): n is a, c, g, or t
  misc_feature (43)..(44): n is a, c, g, or t
  misc_feature (53)..(54): n is a, c, g, or t
tttttttaagcagtggtatcaacgcagagtacnnattggtgcnntggcagtanntttttttttttttttttttttttttttttt

SEQ ID NO: 6928 - DNA, 84 bp, Artificial
  Barcode component
  misc_feature (33)..(34): n is a, c, g, or t
  misc_feature (43)..(44): n is a, c, g, or t
  misc_feature (53)..(54): n is a, c, g, or t
tttttttaagcagtggtatcaacgcagagtacnnattggtgcnncggtagttnntttttttttttttttttttttttttttttt

SEQ ID NO: 6929 - DNA, 84 bp, Artificial
  Barcode component
  misc_feature (33)..(34): n is a, c, g, or t
  misc_feature (43)..(44): n is a, c, g, or t
  misc_feature (53)..(54): n is a, c, g, or t
tttttttaagcagtggtatcaacgcagagtacnnattggtgcnntgacttcgnntttttttttttttttttttttttttttttt

SEQ ID NO: 6930 - DNA, 84 bp, Artificial
  Barcode component
  misc_feature (33)..(34): n is a, c, g, or t
  misc_feature (43)..(44): n is a, c, g, or t
  misc_feature (53)..(54): n is a, c, g, or t
tttttttaagcagtggtatcaacgcagagtacnnattggtgcnngagtgcaanntttttttttttttttttttttttttttttt

SEQ ID NO: 6931 - DNA, 84 bp, Artificial
  Barcode component
  misc_feature (33)..(34): n is a, c, g, or t
  misc_feature (43)..(44): n is a, c, g, or t
  misc_feature (53)..(54): n is a, c, g, or t
tttttttaagcagtggtatcaacgcagagtacnnattggtgcnnacggtaacnntttttttttttttttttttttttttttttt

SEQ ID NO: 6932 - DNA, 84 bp, Artificial
  Barcode component
  misc_feature (33)..(34): n is a, c, g, or t
  misc_feature (43)..(44): n is a, c, g, or t
  misc_feature (53)..(54): n is a, c, g, or t
tttttttaagcagtggtatcaacgcagagtacnnattggtgcnnaagtggtgnntttttttttttttttttttttttttttttt

SEQ ID NO: 6933 - DNA, 84 bp, Artificial
  Barcode component
  misc_feature (33)..(34): n is a, c, g, or t
  misc_feature (43)..(44): n is a, c, g, or t
  misc_feature (53)..(54): n is a, c, g, or t
tttttttaagcagtggtatcaacgcagagtacnnattggtgcnnggagacaanntttttttttttttttttttttttttttttt

SEQ ID NO: 6934 - DNA, 84 bp, Artificial
  Barcode component
  misc_feature (33)..(34): n is a, c, g, or t
  misc_feature (43)..(44): n is a, c, g, or t
  misc_feature (53)..(54): n is a, c, g, or t
tttttttaagcagtggtatcaacgcagagtacnnattggtgcnntcaaggacnntttttttttttttttttttttttttttttt

SEQ ID NO: 6935 - DNA, 84 bp, Artificial
  Barcode component
  misc_feature (33)..(34): n is a, c, g, or t
  misc_feature (43)..(44): n is a, c, g, or t
  misc_feature (53)..(54): n is a, c, g, or t
tttttttaagcagtggtatcaacgcagagtacnnattggtgcnnaagagagcnntttttttttttttttttttttttttttttt

SEQ ID NO: 6936 - DNA, 84 bp, Artificial
  Barcode component
  misc_feature (33)..(34): n is a, c, g, or t
  misc_feature (43)..(44): n is a, c, g, or t
  misc_feature (53)..(54): n is a, c, g, or t
tttttttaagcagtggtatcaacgcagagtacnnattggtgcnncgagagatnntttttttttttttttttttttttttttttt

SEQ ID NO: 6937 - DNA, 84 bp, Artificial
  Barcode component
  misc_feature (33)..(34): n is a, c, g, or t
  misc_feature (43)..(44): n is a, c, g, or t
  misc_feature (53)..(54): n is a, c, g, or t
tttttttaagcagtggtatcaacgcagagtacnnattggtgcnnacagatggnntttttttttttttttttttttttttttttt

SEQ ID NO: 6938 - DNA, 84 bp, Artificial
  Barcode component
  misc_feature (33)..(34): n is a, c, g, or t
  misc_feature (43)..(44): n is a, c, g, or t
  misc_feature (53)..(54): n is a, c, g, or t
tttttttaagcagtggtatcaacgcagagtacnnattggtgcnnaggagtcanntttttttttttttttttttttttttttttt

SEQ ID NO: 6939 - DNA, 84 bp, Artificial
  Barcode component
  misc_feature (33)..(34): n is a, c, g, or t
  misc_feature (43)..(44): n is a, c, g, or t
  misc_feature (53)..(54): n is a, c, g, or t
tttttttaagcagtggtatcaacgcagagtacnnattggtgcnncgtgttacnntttttttttttttttttttttttttttttt

SEQ ID NO: 6940 - DNA, 84 bp, Artificial
  Barcode component
  misc_feature (33)..(34): n is a, c, g, or t
  misc_feature (43)..(44): n is a, c, g, or t
  misc_feature (53)..(54): n is a, c, g, or t
tttttttaagcagtggtatcaacgcagagtacnnattggtgcnntagtgtgcnntttttttttttttttttttttttttttttt

SEQ ID NO: 6941 - DNA, 84 bp, Artificial
  Barcode component
  misc_feature (33)..(34): n is a, c, g, or t
  misc_feature (43)..(44): n is a, c, g, or t
  misc_feature (53)..(54): n is a, c, g, or t
tttttttaagcagtggtatcaacgcagagtacnnattggtgcnnctcatgacnntttttttttttttttttttttttttttttt

SEQ ID NO: 6942 - DNA, 84 bp, Artificial
  Barcode component
  misc_feature (33)..(34): n is a, c, g, or t
  misc_feature (43)..(44): n is a, c, g, or t
  misc_feature (53)..(54): n is a, c, g, or t
tttttttaagcagtggtatcaacgcagagtacnnattggtgcnngtatccagnntttttttttttttttttttttttttttttt

SEQ ID NO: 6943 - DNA, 84 bp, Artificial
  Barcode component
  misc_feature (33)..(34): n is a, c, g, or t
  misc_feature (43)..(44): n is a, c, g, or t
  misc_feature (53)..(54): n is a, c, g, or t
tttttttaagcagtggtatcaacgcagagtacnnattggtgcnnacgcctatnntttttttttttttttttttttttttttttt

SEQ ID NO: 6944 - DNA, 84 bp, Artificial
  Barcode component
  misc_feature (33)..(34): n is a, c, g, or t
  misc_feature (43)..(44): n is a, c, g, or t
  misc_feature (53)..(54): n is a, c, g, or t
tttttttaagcagtggtatcaacgcagagtacnnattggtgcnnaacgacctnntttttttttttttttttttttttttttttt

SEQ ID NO: 6945 - DNA, 84 bp, Artificial
  Barcode component
  misc_feature (33)..(34): n is a, c, g, or t
  misc_feature (43)..(44): n is a, c, g, or t
  misc_feature (53)..(54): n is a, c, g, or t
tttttttaagcagtggtatcaacgcagagtacnnattggtgcnnatcaggctnntttttttttttttttttttttttttttttt

SEQ ID NO: 6946 - DNA, 84 bp, Artificial
  Barcode component
  misc_feature (33)..(34): n is a, c, g, or t
  misc_feature (43)..(44): n is a, c, g, or t
  misc_feature (53)..(54): n is a, c, g, or t
tttttttaagcagtggtatcaacgcagagtacnnattggtgcnncaagttcgnntttttttttttttttttttttttttttttt

SEQ ID NO: 6947 - DNA, 84 bp, Artificial
  Barcode component
  misc_feature (33)..(34): n is a, c, g, or t
  misc_feature (43)..(44): n is a, c, g, or t
  misc_feature (53)..(54): n is a, c, g, or t
tttttttaagcagtggtatcaacgcagagtacnnattggtgcnntagccaganntttttttttttttttttttttttttttttt

SEQ ID NO: 6948 - DNA, 84 bp, Artificial
  Barcode component
  misc_feature (33)..(34): n is a, c, g, or t
  misc_feature (43)..(44): n is a, c, g, or t
  misc_feature (53)..(54): n is a, c, g, or t
tttttttaagcagtggtatcaacgcagagtacnnattggtgcnncaatcacgnntttttttttttttttttttttttttttttt

SEQ ID NO: 6949 - DNA, 84 bp, Artificial
  Barcode component
  misc_feature (33)..(34): n is a, c, g, or t
  misc_feature (43)..(44): n is a, c, g, or t
  misc_feature (53)..(54): n is a, c, g, or t
tttttttaagcagtggtatcaacgcagagtacnnattggtgcnngcaacaagnntttttttttttttttttttttttttttttt

SEQ ID NO: 6950 - DNA, 84 bp, Artificial
  Barcode component
  misc_feature (33)..(34): n is a, c, g, or t
  misc_feature (43)..(44): n is a, c, g, or t
  misc_feature (53)..(54): n is a, c, g, or t
tttttttaagcagtggtatcaacgcagagtacnnattggtgcnncacgacaanntttttttttttttttttttttttttttttt

SEQ ID NO: 6951 - DNA, 84 bp, Artificial
  Barcode component
  misc_feature (33)..(34): n is a, c, g, or t
  misc_feature (43)..(44): n is a, c, g, or t
  misc_feature (53)..(54): n is a, c, g, or t
tttttttaagcagtggtatcaacgcagagtacnnattggtgcnntacggaganntttttttttttttttttttttttttttttt

SEQ ID NO: 6952 - DNA, 84 bp, Artificial
  Barcode component
  misc_feature (33)..(34): n is a, c, g, or t
  misc_feature (43)..(44): n is a, c, g, or t
  misc_feature (53)..(54): n is a, c, g, or t
tttttttaagcagtggtatcaacgcagagtacnnattggtgcnncgacaaganntttttttttttttttttttttttttttttt

SEQ ID NO: 6953 - DNA, 84 bp, Artificial
  Barcode component
  misc_feature (33)..(34): n is a, c, g, or t
  misc_feature (43)..(44): n is a, c, g, or t
  misc_feature (53)..(54): n is a, c, g, or t
tttttttaagcagtggtatcaacgcagagtacnnattggtgcnncgaagtganntttttttttttttttttttttttttttttt

SEQ ID NO: 6954 - DNA, 84 bp, Artificial
  Barcode component
  misc_feature (33)..(34): n is a, c, g, or t
  misc_feature (43)..(44): n is a, c, g, or t
  misc_feature (53)..(54): n is a, c, g, or t
tttttttaagcagtggtatcaacgcagagtacnnattggtgcnnagctggtanntttttttttttttttttttttttttttttt

SEQ ID NO: 6955 - DNA, 84 bp, Artificial
  Barcode component
  misc_feature (33)..(34): n is a, c, g, or t
  misc_feature (43)..(44): n is a, c, g, or t
  misc_feature (53)..(54): n is a, c, g, or t
tttttttaagcagtggtatcaacgcagagtacnnattggtgcnnaactaggcnntttttttttttttttttttttttttttttt

SEQ ID NO: 6956 - DNA, 84 bp, Artificial
  Barcode component
  misc_feature (33)..(34): n is a, c, g, or t
  misc_feature (43)..(44): n is a, c, g, or t
  misc_feature (53)..(54): n is a, c, g, or t
tttttttaagcagtggtatcaacgcagagtacnnattggtgcnncagcaagtnntttttttttttttttttttttttttttttt

SEQ ID NO: 6957 - DNA, 84 bp, Artificial
  Barcode component
  misc_feature (33)..(34): n is a, c, g, or t
  misc_feature (43)..(44): n is a, c, g, or t
  misc_feature (53)..(54): n is a, c, g, or t
tttttttaagcagtggtatcaacgcagagtacnnattggtgcnnacgaggtanntttttttttttttttttttttttttttttt

SEQ ID NO: 6958 - DNA, 84 bp, Artificial
  Barcode component
  misc_feature (33)..(34): n is a, c, g, or t
  misc_feature (43)..(44): n is a, c, g, or t
  misc_feature (53)..(54): n is a, c, g, or t
tttttttaagcagtggtatcaacgcagagtacnnattggtgcnncatcttccnntttttttttttttttttttttttttttttt

SEQ ID NO: 6959 - DNA, 84 bp, Artificial
  Barcode component
  misc_feature (33)..(34): n is a, c, g, or t
  misc_feature (43)..(44): n is a, c, g, or t
  misc_feature (53)..(54): n is a, c, g, or t
tttttttaagcagtggtatcaacgcagagtacnnattggtgcnncctgaatcnntttttttttttttttttttttttttttttt

SEQ ID NO: 6960 - DNA, 84 bp, Artificial
  Barcode component
  misc_feature (33)..(34): n is a, c, g, or t
  misc_feature (43)..(44): n is a, c, g, or t
  misc_feature (53)..(54): n is a, c, g, or t
tttttttaagcagtggtatcaacgcagagtacnnattggtgcnntgcagactnntttttttttttttttttttttttttttttt

SEQ ID NO: 6961 - DNA, 84 bp, Artificial
  Barcode component
  misc_feature (33)..(34): n is a, c, g, or t
  misc_feature (43)..(44): n is a, c, g, or t
  misc_feature (53)..(54): n is a, c, g, or t
tttttttaagcagtggtatcaacgcagagtacnnattggtgcnnagatgtggnntttttttttttttttttttttttttttttt

SEQ ID NO: 6962 - DNA, 84 bp, Artificial
  Barcode component
  misc_feature (33)..(34): n is a, c, g, or t
  misc_feature (43)..(44): n is a, c, g, or t
  misc_feature (53)..(54): n is a, c, g, or t
tttttttaagcagtggtatcaacgcagagtacnnattggtgcnnagttcgacnntttttttttttttttttttttttttttttt

SEQ ID NO: 6963 - DNA, 84 bp, Artificial
  Barcode component
  misc_feature (33)..(34): n is a, c, g, or t
  misc_feature (43)..(44): n is a, c, g, or t
  misc_feature (53)..(54): n is a, c, g, or t
tttttttaagcagtggtatcaacgcagagtacnnattggtgcnnacaacctcnntttttttttttttttttttttttttttttt

SEQ ID NO: 6964 - DNA, 84 bp, Artificial
  Barcode component
  misc_feature (33)..(34): n is a, c, g, or t
  misc_feature (43)..(44): n is a, c, g, or t
  misc_feature (53)..(54): n is a, c, g, or t
tttttttaagcagtggtatcaacgcagagtacnnattggtgcnncatggtagnntttttttttttttttttttttttttttttt

SEQ ID NO: 6965 - DNA, 84 bp, Artificial
  Barcode component
  misc_feature (33)..(34): n is a, c, g, or t
  misc_feature (43)..(44): n is a, c, g, or t
  misc_feature (53)..(54): n is a, c, g, or t
tttttttaagcagtggtatcaacgcagagtacnnattggtgcnncgtatctcnntttttttttttttttttttttttttttttt

SEQ ID NO: 6966 - DNA, 84 bp, Artificial
  Barcode component
  misc_feature (33)..(34): n is a, c, g, or t
  misc_feature (43)..(44): n is a, c, g, or t
  misc_feature (53)..(54): n is a, c, g, or t
tttttttaagcagtggtatcaacgcagagtacnnattggtgcnncctagttcnntttttttttttttttttttttttttttttt

SEQ ID NO: 6967 - DNA, 84 bp, Artificial
  Barcode component
  misc_feature (33)..(34): n is a, c, g, or t
  misc_feature (43)..(44): n is a, c, g, or t
  misc_feature (53)..(54): n is a, c, g, or t
tttttttaagcagtggtatcaacgcagagtacnnattggtgcnncaagagtcnntttttttttttttttttttttttttttttt

SEQ ID NO: 6968 - DNA, 84 bp, Artificial
  Barcode component
  misc_feature (33)..(34): n is a, c, g, or t
  misc_feature (43)..(44): n is a, c, g, or t
  misc_feature (53)..(54): n is a, c, g, or t
tttttttaagcagtggtatcaacgcagagtacnnggtggattnnaatcggcanntttttttttttttttttttttttttttttt

SEQ ID NO: 6969 - DNA, 84 bp, Artificial
  Barcode component
  misc_feature (33)..(34): n is a, c, g, or t
  misc_feature (43)..(44): n is a, c, g, or t
  misc_feature (53)..(54): n is a, c, g, or t
tttttttaagcagtggtatcaacgcagagtacnnggtggattnntacggcatnntttttttttttttttttttttttttttttt

SEQ ID NO: 6970 - DNA, 84 bp, Artificial
  Barcode component
  misc_feature (33)..(34): n is a, c, g, or t
  misc_feature (43)..(44): n is a, c, g, or t
  misc_feature (53)..(54): n is a, c, g, or t
tttttttaagcagtggtatcaacgcagagtacnnggtggattnnttggatcgnntttttttttttttttttttttttttttttt

SEQ ID NO: 6971 - DNA, 84 bp, Artificial
  Barcode component
  misc_feature (33)..(34): n is a, c, g, or t
  misc_feature (43)..(44): n is a, c, g, or t
  misc_feature (53)..(54): n is a, c, g, or t
tttttttaagcagtggtatcaacgcagagtacnnggtggattnntggaacganntttttttttttttttttttttttttttttt

SEQ ID NO: 6972 - DNA, 84 bp, Artificial
  Barcode component
  misc_feature (33)..(34): n is a, c, g, or t
  misc_feature (43)..(44): n is a, c, g, or t
  misc_feature (53)..(54): n is a, c, g, or t
tttttttaagcagtggtatcaacgcagagtacnnggtggattnnggcaatcanntttttttttttttttttttttttttttttt

SEQ ID NO: 6973 - DNA, 84 bp, Artificial
  Barcode component
  misc_feature (33)..(34): n is a, c, g, or t
  misc_feature (43)..(44): n is a, c, g, or t
  misc_feature (53)..(54): n is a, c, g, or t
tttttttaagcagtggtatcaacgcagagtacnnggtggattnngaatccganntttttttttttttttttttttttttttttt

SEQ ID NO: 6974 - DNA, 84 bp, Artificial
  Barcode component
  misc_feature (33)..(34): n is a, c, g, or t
  misc_feature (43)..(44): n is a, c, g, or t
  misc_feature (53)..(54): n is a, c, g, or t
tttttttaagcagtggtatcaacgcagagtacnnggtggattnnttacggtgnntttttttttttttttttttttttttttttt

SEQ ID NO: 6975 - DNA, 84 bp, Artificial
  Barcode component
  misc_feature (33)..(34): n is a, c, g, or t
  misc_feature (43)..(44): n is a, c, g, or t
  misc_feature (53)..(54): n is a, c, g, or t
tttttttaagcagtggtatcaacgcagagtacnnggtggattnncatatcggnntttttttttttttttttttttttttttttt

SEQ ID NO: 6976 - DNA, 84 bp, Artificial
  Barcode component
  misc_feature (33)..(34): n is a, c, g, or t
  misc_feature (43)..(44): n is a, c, g, or t
  misc_feature (53)..(54): n is a, c, g, or t
tttttttaagcagtggtatcaacgcagagtacnnggtggattnncttcggtanntttttttttttttttttttttttttttttt

SEQ ID NO: 6977 - DNA, 84 bp, Artificial
  Barcode component
  misc_feature (33)..(34): n is a, c, g, or t
  misc_feature (43)..(44): n is a, c, g, or t
  misc_feature (53)..(54): n is a, c, g, or t
tttttttaagcagtggtatcaacgcagagtacnnggtggattnntcctaacgnntttttttttttttttttttttttttttttt

SEQ ID NO: 6978 - DNA, 84 bp, Artificial
  Barcode component
  misc_feature (33)..(34): n is a, c, g, or t
  misc_feature (43)..(44): n is a, c, g, or t
  misc_feature (53)..(54): n is a, c, g, or t
tttttttaagcagtggtatcaacgcagagtacnnggtggattnngtaagccanntttttttttttttttttttttttttttttt

SEQ ID NO: 6979 - DNA, 84 bp, Artificial
  Barcode component
  misc_feature (33)..(34): n is a, c, g, or t
  misc_feature (43)..(44): n is a, c, g, or t
  misc_feature (53)..(54): n is a, c, g, or t
tttttttaagcagtggtatcaacgcagagtacnnggtggattnntaaggtggnntttttttttttttttttttttttttttttt

SEQ ID NO: 6980 - DNA, 84 bp, Artificial
  Barcode component
  misc_feature (33)..(34): n is a, c, g, or t
  misc_feature (43)..(44): n is a, c, g, or t
  misc_feature (53)..(54): n is a, c, g, or t
tttttttaagcagtggtatcaacgcagagtacnnggtggattnnggtaagctnntttttttttttttttttttttttttttttt

SEQ ID NO: 6981 - DNA, 84 bp, Artificial
  Barcode component
  misc_feature (33)..(34): n is a, c, g, or t
  misc_feature (43)..(44): n is a, c, g, or t
  misc_feature (53)..(54): n is a, c, g, or t
tttttttaagcagtggtatcaacgcagagtacnnggtggattnntgtgtcganntttttttttttttttttttttttttttttt

SEQ ID NO: 6982 - DNA, 84 bp, Artificial
  Barcode component
  misc_feature (33)..(34): n is a, c, g, or t
  misc_feature (43)..(44): n is a, c, g, or t
  misc_feature (53)..(54): n is a, c, g, or t
tttttttaagcagtggtatcaacgcagagtacnnggtggattnngagcatganntttttttttttttttttttttttttttttt

SEQ ID NO: 6983 - DNA, 84 bp, Artificial
  Barcode component
  misc_feature (33)..(34): n is a, c, g, or t
  misc_feature (43)..(44): n is a, c, g, or t
  misc_feature (53)..(54): n is a, c, g, or t
tttttttaagcagtggtatcaacgcagagtacnnggtggattnntcgaagtcnntttttttttttttttttttttttttttttt

SEQ ID NO: 6984 - DNA, 84 bp, Artificial
  Barcode component
  misc_feature (33)..(34): n is a, c, g, or t
  misc_feature (43)..(44): n is a, c, g, or t
  misc_feature (53)..(54): n is a, c, g, or t
tttttttaagcagtggtatcaacgcagagtacnnggtggattnnggtgaacanntttttttttttttttttttttttttttttt

SEQ ID NO: 6985 - DNA, 84 bp, Artificial
  Barcode component
  misc_feature (33)..(34): n is a, c, g, or t
  misc_feature (43)..(44): n is a, c, g, or t
  misc_feature (53)..(54): n is a, c, g, or t
tttttttaagcagtggtatcaacgcagagtacnnggtggattnnacatgcacnntttttttttttttttttttttttttttttt

SEQ ID NO: 6986 - DNA, 84 bp, Artificial
  Barcode component
  misc_feature (33)..(34): n is a, c, g, or t
  misc_feature (43)..(44): n is a, c, g, or t
  misc_feature (53)..(54): n is a, c, g, or t
tttttttaagcagtggtatcaacgcagagtacnnggtggattnnccaacagtnntttttttttttttttttttttttttttttt

SEQ ID NO: 6987 - DNA, 84 bp, Artificial
  Barcode component
  misc_feature (33)..(34): n is a, c, g, or t
  misc_feature (43)..(44): n is a, c, g, or t
  misc_feature (53)..(54): n is a, c, g, or t
tttttttaagcagtggtatcaacgcagagtacnnggtggattnnagaacagcnntttttttttttttttttttttttttttttt

SEQ ID NO: 6988 - DNA, 84 bp, Artificial
  Barcode component
  misc_feature (33)..(34): n is a, c, g, or t
  misc_feature (43)..(44): n is a, c, g, or t
  misc_feature (53)..(54): n is a, c, g, or t
tttttttaagcagtggtatcaacgcagagtacnnggtggattnngaacacgtnntttttttttttttttttttttttttttttt

SEQ ID NO: 6989 - DNA, 84 bp, Artificial
  Barcode component
  misc_feature (33)..(34): n is a, c, g, or t
  misc_feature (43)..(44): n is a, c, g, or t
  misc_feature (53)..(54): n is a, c, g, or t
tttttttaagcagtggtatcaacgcagagtacnnggtggattnnggtcttcanntttttttttttttttttttttttttttttt

SEQ ID NO: 6990 - DNA, 84 bp, Artificial
  Barcode component
  misc_feature (33)..(34): n is a, c, g, or t
  misc_feature (43)..(44): n is a, c, g, or t
  misc_feature (53)..(54): n is a, c, g, or t
tttttttaagcagtggtatcaacgcagagtacnnggtggattnnaggttcagnntttttttttttttttttttttttttttttt

SEQ ID NO: 6991 - DNA, 84 bp, Artificial
  Barcode component
  misc_feature (33)..(34): n is a, c, g, or t
  misc_feature (43)..(44): n is a, c, g, or t
  misc_feature (53)..(54): n is a, c, g, or t
tttttttaagcagtggtatcaacgcagagtacnnggtggattnnctagagcanntttttttttttttttttttttttttttttt

SEQ ID NO: 6992 - DNA, 84 bp, Artificial
  Barcode component
  misc_feature (33)..(34): n is a, c, g, or t
  misc_feature (43)..(44): n is a, c, g, or t
  misc_feature (53)..(54): n is a, c, g, or t
tttttttaagcagtggtatcaacgcagagtacnnggtggattnncttctagcnntttttttttttttttttttttttttttttt

SEQ ID NO: 6993 - DNA, 84 bp, Artificial
  Barcode component
  misc_feature (33)..(34): n is a, c, g, or t
  misc_feature (43)..(44): n is a, c, g, or t
  misc_feature (53)..(54): n is a, c, g, or t
tttttttaagcagtggtatcaacgcagagtacnnggtggattnngagtaacgnntttttttttttttttttttttttttttttt

SEQ ID NO: 6994 - DNA, 84 bp, Artificial
  Barcode component
  misc_feature (33)..(34): n is a, c, g, or t
  misc_feature (43)..(44): n is a, c, g, or t
  misc_feature (53)..(54): n is a, c, g, or t
tttttttaagcagtggtatcaacgcagagtacnnggtggattnnctaagaggnntttttttttttttttttttttttttttttt

SEQ ID NO: 6995 - DNA, 84 bp, Artificial
  Barcode component
  misc_feature (33)..(34): n is a, c, g, or t
  misc_feature (43)..(44): n is a, c, g, or t
  misc_feature (53)..(54): n is a, c, g, or t
tttttttaagcagtggtatcaacgcagagtacnnggtggattnnacgtgtagnntttttttttttttttttttttttttttttt

SEQ ID NO: 6996 - DNA, 84 bp, Artificial
  Barcode component
  misc_feature (33)..(34): n is a, c, g, or t
  misc_feature (43)..(44): n is a, c, g, or t
  misc_feature (53)..(54): n is a, c, g, or t
tttttttaagcagtggtatcaacgcagagtacnnggtggattnnactacaggnntttttttttttttttttttttttttttttt

SEQ ID NO: 6997 - DNA, 84 bp, Artificial
  Barcode component
  misc_feature (33)..(34): n is a, c, g, or t
  misc_feature (43)..(44): n is a, c, g, or t
  misc_feature (53)..(54): n is a, c, g, or t
tttttttaagcagtggtatcaacgcagagtacnnggtggattnntacaggtcnntttttttttttttttttttttttttttttt

SEQ ID NO: 6998 - DNA, 84 bp, Artificial
  Barcode component
  misc_feature (33)..(34): n is a, c, g, or t
  misc_feature (43)..(44): n is a, c, g, or t
  misc_feature (53)..(54): n is a, c, g, or t
tttttttaagcagtggtatcaacgcagagtacnnggtggattnnctcacatgnntttttttttttttttttttttttttttttt

SEQ ID NO: 6999 - DNA, 84 bp, Artificial
  Barcode component
  misc_feature (33)..(34): n is a, c, g, or t
  misc_feature (43)..(44): n is a, c, g, or t
  misc_feature (53)..(54): n is a, c, g, or t
tttttttaagcagtggtatcaacgcagagtacnnggtggattnnactaggagnntttttttttttttttttttttttttttttt

SEQ ID NO: 7000 - DNA, 84 bp, Artificial
  Barcode component
  misc_feature (33)..(34): n is a, c, g, or t
  misc_feature (43)..(44): n is a, c, g, or t
  misc_feature (53)..(54): n is a, c, g, or t
tttttttaagcagtggtatcaacgcagagtacnnggtggattnnccatagganntttttttttttttttttttttttttttttt

SEQ ID NO: 7001 - DNA, 84 bp, Artificial
  Barcode component
  misc_feature (33)..(34): n is a, c, g, or t
  misc_feature (43)..(44): n is a, c, g, or t
  misc_feature (53)..(54): n is a, c, g, or t
tttttttaagcagtggtatcaacgcagagtacnnggtggattnnggagaatcnntttttttttttttttttttttttttttttt

SEQ ID NO: 7002 - DNA, 84 bp, Artificial
  Barcode component
  misc_feature (33)..(34): n is a, c, g, or t
  misc_feature (43)..(44): n is a, c, g, or t
  misc_feature (53)..(54): n is a, c, g, or t
tttttttaagcagtggtatcaacgcagagtacnnggtggattnngccaagaanntttttttttttttttttttttttttttttt

SEQ ID NO: 7003 - DNA, 84 bp, Artificial
  Barcode component
  misc_feature (33)..(34): n is a, c, g, or t
  misc_feature (43)..(44): n is a, c, g, or t
  misc_feature (53)..(54): n is a, c, g, or t
tttttttaagcagtggtatcaacgcagagtacnnggtggattnnaaggcaagnntttttttttttttttttttttttttttttt

SEQ ID NO: 7004 - DNA, 84 bp, Artificial
  Barcode component
  misc_feature (33)..(34): n is a, c, g, or t
  misc_feature (43)..(44): n is a, c, g, or t
  misc_feature (53)..(54): n is a, c, g, or t
tttttttaagcagtggtatcaacgcagagtacnnggtggattnnaatgtcgcnntttttttttttttttttttttttttttttt

SEQ ID NO: 7005 - DNA, 84 bp, Artificial
  Barcode component
  misc_feature (33)..(34): n is a, c, g, or t
  misc_feature (43)..(44): n is a, c, g, or t
  misc_feature (53)..(54): n is a, c, g, or t
tttttttaagcagtggtatcaacgcagagtacnnggtggattnnatggaaccnntttttttttttttttttttttttttttttt

SEQ ID NO: 7006 - DNA, 84 bp, Artificial
  Barcode component
  misc_feature (33)..(34): n is a, c, g, or t
  misc_feature (43)..(44): n is a, c, g, or t
  misc_feature (53)..(54): n is a, c, g, or t
tttttttaagcagtggtatcaacgcagagtacnnggtggattnnagaggcatnntttttttttttttttttttttttttttttt

SEQ ID NO: 7007 - DNA, 84 bp, Artificial
  Barcode component
  misc_feature (33)..(34): n is a, c, g, or t
  misc_feature (43)..(44): n is a, c, g, or t
  misc_feature (53)..(54): n is a, c, g, or t
tttttttaagcagtggtatcaacgcagagtacnnggtggattnntgcatagcnntttttttttttttttttttttttttttttt

SEQ ID NO: 7008 - DNA, 84 bp, Artificial
  Barcode component
  misc_feature (33)..(34): n is a, c, g, or t
  misc_feature (43)..(44): n is a, c, g, or t
  misc_feature (53)..(54): n is a, c, g, or t
tttttttaagcagtggtatcaacgcagagtacnnggtggattnnctaacgganntttttttttttttttttttttttttttttt

SEQ ID NO: 7009 - DNA, 84 bp, Artificial
  Barcode component
  misc_feature (33)..(34): n is a, c, g, or t
  misc_feature (43)..(44): n is a, c, g, or t
  misc_feature (53)..(54): n is a, c, g, or t
tttttttaagcagtggtatcaacgcagagtacnnggtggattnntatcgaggnntttttttttttttttttttttttttttttt

SEQ ID NO: 7010 - DNA, 84 bp, Artificial
  Barcode component
  misc_feature (33)..(34): n is a, c, g, or t
  misc_feature (43)..(44): n is a, c, g, or t
  misc_feature (53)..(54): n is a, c, g, or t
tttttttaagcagtggtatcaacgcagagtacnnggtggattnncatagcctnntttttttttttttttttttttttttttttt

SEQ ID NO: 7011 - DNA, 84 bp, Artificial
  Barcode component
  misc_feature (33)..(34): n is a, c, g, or t
  misc_feature (43)..(44): n is a, c, g, or t
  misc_feature (53)..(54): n is a, c, g, or t
tttttttaagcagtggtatcaacgcagagtacnnggtggattnnatcgagacnntttttttttttttttttttttttttttttt

SEQ ID NO: 7012 - DNA, 84 bp, Artificial
  Barcode component
  misc_feature (33)..(34): n is a, c, g, or t
  misc_feature (43)..(44): n is a, c, g, or t
  misc_feature (53)..(54): n is a, c, g, or t
tttttttaagcagtggtatcaacgcagagtacnnggtggattnnggaagagtnntttttttttttttttttttttttttttttt

SEQ ID NO: 7013 - DNA, 84 bp, Artificial
  Barcode component
  misc_feature (33)..(34): n is a, c, g, or t
  misc_feature (43)..(44): n is a, c, g, or t
  misc_feature (53)..(54): n is a, c, g, or t
tttttttaagcagtggtatcaacgcagagtacnnggtggattnnccaagtagnntttttttttttttttttttttttttttttt

SEQ ID NO: 7014 - DNA, 84 bp, Artificial
  Barcode component
  misc_feature (33)..(34): n is a, c, g, or t
  misc_feature (43)..(44): n is a, c, g, or t
  misc_feature (53)..(54): n is a, c, g, or t
tttttttaagcagtggtatcaacgcagagtacnnggtggattnnctgaacagnntttttttttttttttttttttttttttttt

SEQ ID NO: 7015 - DNA, 84 bp, Artificial
  Barcode component
  misc_feature (33)..(34): n is a, c, g, or t
  misc_feature (43)..(44): n is a, c, g, or t
  misc_feature (53)..(54): n is a, c, g, or t
tttttttaagcagtggtatcaacgcagagtacnnggtggattnngtaggttcnntttttttttttttttttttttttttttttt

SEQ ID NO: 7016 - DNA, 84 bp, Artificial
  Barcode component
  misc_feature (33)..(34): n is a, c, g, or t
  misc_feature (43)..(44): n is a, c, g, or t
  misc_feature (53)..(54): n is a, c, g, or t
tttttttaagcagtggtatcaacgcagagtacnnggtggattnngtatggacnntttttttttttttttttttttttttttttt

SEQ ID NO: 7017 - DNA, 84 bp, Artificial
  Barcode component
  misc_feature (33)..(34): n is a, c, g, or t
  misc_feature (43)..(44): n is a, c, g, or t
  misc_feature (53)..(54): n is a, c, g, or t
tttttttaagcagtggtatcaacgcagagtacnnggtggattnntcgcaacanntttttttttttttttttttttttttttttt

SEQ ID NO: 7018 - DNA, 84 bp, Artificial
  Barcode component
  misc_feature (33)..(34): n is a, c, g, or t
  misc_feature (43)..(44): n is a, c, g, or t
  misc_feature (53)..(54): n is a, c, g, or t
tttttttaagcagtggtatcaacgcagagtacnnggtggattnnccgctaatnntttttttttttttttttttttttttttttt

SEQ ID NO: 7019 - DNA, 84 bp, Artificial
  Barcode component
  misc_feature (33)..(34): n is a, c, g, or t
  misc_feature (43)..(44): n is a, c, g, or t
  misc_feature (53)..(54): n is a, c, g, or t
tttttttaagcagtggtatcaacgcagagtacnnggtggattnngattcgcanntttttttttttttttttttttttttttttt

SEQ ID NO: 7020 - DNA, 84 bp, Artificial
  Barcode component
  misc_feature (33)..(34): n is a, c, g, or t
  misc_feature (43)..(44): n is a, c, g, or t
  misc_feature (53)..(54): n is a, c, g, or t
tttttttaagcagtggtatcaacgcagagtacnnggtggattnncgatggaanntttttttttttttttttttttttttttttt

SEQ ID NO: 7021 - DNA, 84 bp, Artificial
  Barcode component
  misc_feature (33)..(34): n is a, c, g, or t
  misc_feature (43)..(44): n is a, c, g, or t
  misc_feature (53)..(54): n is a, c, g, or t
tttttttaagcagtggtatcaacgcagagtacnnggtggattnnagcaagganntttttttttttttttttttttttttttttt

SEQ ID NO: 7022 - DNA, 84 bp, Artificial
  Barcode component
  misc_feature (33)..(34): n is a, c, g, or t
  misc_feature (43)..(44): n is a, c, g, or t
  misc_feature (53)..(54): n is a, c, g, or t
tttttttaagcagtggtatcaacgcagagtacnnggtggattnncgtagcaanntttttttttttttttttttttttttttttt

SEQ ID NO: 7023 - DNA, 84 bp, Artificial
  Barcode component
  misc_feature (33)..(34): n is a, c, g, or t
  misc_feature (43)..(44): n is a, c, g, or t
  misc_feature (53)..(54): n is a, c, g, or t
tttttttaagcagtggtatcaacgcagagtacnnggtggattnntggcagtanntttttttttttttttttttttttttttttt

SEQ ID NO: 7024 - DNA, 84 bp, Artificial
  Barcode component
  misc_feature (33)..(34): n is a, c, g, or t
  misc_feature (43)..(44): n is a, c, g, or t
  misc_feature (53)..(54): n is a, c, g, or t
tttttttaagcagtggtatcaacgcagagtacnnggtggattnncggtagttnntttttttttttttttttttttttttttttt

SEQ ID NO: 7025 - DNA, 84 bp, Artificial
  Barcode component
  misc_feature (33)..(34): n is a, c, g, or t
  misc_feature (43)..(44): n is a, c, g, or t
  misc_feature (53)..(54): n is a, c, g, or t
tttttttaagcagtggtatcaacgcagagtacnnggtggattnntgacttcgnntttttttttttttttttttttttttttttt

SEQ ID NO: 7026 - DNA, 84 bp, Artificial
  Barcode component
  misc_feature (33)..(34): n is a, c, g, or t
  misc_feature (43)..(44): n is a, c, g, or t
  misc_feature (53)..(54): n is a, c, g, or t
tttttttaagcagtggtatcaacgcagagtacnnggtggattnngagtgcaanntttttttttttttttttttttttttttttt

SEQ ID NO: 7027 - DNA, 84 bp, Artificial
  Barcode component
  misc_feature (33)..(34): n is a, c, g, or t
  misc_feature (43)..(44): n is a, c, g, or t
  misc_feature (53)..(54): n is a, c, g, or t
tttttttaagcagtggtatcaacgcagagtacnnggtggattnnacggtaacnntttttttttttttttttttttttttttttt

SEQ ID NO: 7028 - DNA, 84 bp, Artificial
  Barcode component
  misc_feature (33)..(34): n is a, c, g, or t
  misc_feature (43)..(44): n is a, c, g, or t
  misc_feature (53)..(54): n is a, c, g, or t
tttttttaagcagtggtatcaacgcagagtacnnggtggattnnaagtggtgnntttttttttttttttttttttttttttttt

SEQ ID NO: 7029 - DNA, 84 bp, Artificial
  Barcode component
  misc_feature (33)..(34): n is a, c, g, or t
  misc_feature (43)..(44): n is a, c, g, or t
  misc_feature (53)..(54): n is a, c, g, or t
tttttttaagcagtggtatcaacgcagagtacnnggtggattnnggagacaanntttttttttttttttttttttttttttttt

SEQ ID NO: 7030 - DNA, 84 bp, Artificial
  Barcode component
  misc_feature (33)..(34): n is a, c, g, or t
  misc_feature (43)..(44): n is a, c, g, or t
  misc_feature (53)..(54): n is a, c, g, or t
tttttttaagcagtggtatcaacgcagagtacnnggtggattnntcaaggacnntttttttttttttttttttttttttttttt

SEQ ID NO: 7031 - DNA, 84 bp, Artificial
  Barcode component
  misc_feature (33)..(34): n is a, c, g, or t
  misc_feature (43)..(44): n is a, c, g, or t
  misc_feature (53)..(54): n is a, c, g, or t
tttttttaagcagtggtatcaacgcagagtacnnggtggattnnaagagagcnntttttttttttttttttttttttttttttt

SEQ ID NO: 7032 - DNA, 84 bp, Artificial
  Barcode component
  misc_feature (33)..(34): n is a, c, g, or t
  misc_feature (43)..(44): n is a, c, g, or t
  misc_feature (53)..(54): n is a, c, g, or t
tttttttaagcagtggtatcaacgcagagtacnnggtggattnncgagagatnntttttttttttttttttttttttttttttt

SEQ ID NO: 7033 - DNA, 84 bp, Artificial
  Barcode component
  misc_feature (33)..(34): n is a, c, g, or t
  misc_feature (43)..(44): n is a, c, g, or t
  misc_feature (53)..(54): n is a, c, g, or t
tttttttaagcagtggtatcaacgcagagtacnnggtggattnnacagatggnntttttttttttttttttttttttttttttt

SEQ ID NO: 7034 - DNA, 84 bp, Artificial
  Barcode component
  misc_feature (33)..(34): n is a, c, g, or t
  misc_feature (43)..(44): n is a, c, g, or t
  misc_feature (53)..(54): n is a, c, g, or t
tttttttaagcagtggtatcaacgcagagtacnnggtggattnnaggagtcanntttttttttttttttttttttttttttttt

SEQ ID NO: 7035 - DNA, 84 bp, Artificial
  Barcode component
  misc_feature (33)..(34): n is a, c, g, or t
  misc_feature (43)..(44): n is a, c, g, or t
  misc_feature (53)..(54): n is a, c, g, or t
tttttttaagcagtggtatcaacgcagagtacnnggtggattnncgtgttacnntttttttttttttttttttttttttttttt

SEQ ID NO: 7036 - DNA, 84 bp, Artificial
  Barcode component
  misc_feature (33)..(34): n is a, c, g, or t
  misc_feature (43)..(44): n is a, c, g, or t
  misc_feature (53)..(54): n is a, c, g, or t
tttttttaagcagtggtatcaacgcagagtacnnggtggattnntagtgtgcnntttttttttttttttttttttttttttttt

SEQ ID NO: 7037 - DNA, 84 bp, Artificial
  Barcode component
  misc_feature (33)..(34): n is a, c, g, or t
  misc_feature (43)..(44): n is a, c, g, or t
  misc_feature (53)..(54): n is a, c, g, or t
tttttttaagcagtggtatcaacgcagagtacnnggtggattnnctcatgacnntttttttttttttttttttttttttttttt

SEQ ID NO: 7038 - DNA, 84 bp, Artificial
  Barcode component
  misc_feature (33)..(34): n is a, c, g, or t
  misc_feature (43)..(44): n is a, c, g, or t
  misc_feature (53)..(54): n is a, c, g, or t
tttttttaagcagtggtatcaacgcagagtacnnggtggattnngtatccagnntttttttttttttttttttttttttttttt

SEQ ID NO: 7039 - DNA, 84 bp, Artificial
  Barcode component
  misc_feature (33)..(34): n is a, c, g, or t
  misc_feature (43)..(44): n is a, c, g, or t
  misc_feature (53)..(54): n is a, c, g, or t
tttttttaagcagtggtatcaacgcagagtacnnggtggattnnacgcctatnntttttttttttttttttttttttttttttt

SEQ ID NO: 7040 - DNA, 84 bp, Artificial
  Barcode component
  misc_feature (33)..(34): n is a, c, g, or t
  misc_feature (43)..(44): n is a, c, g, or t
  misc_feature (53)..(54): n is a, c, g, or t
tttttttaagcagtggtatcaacgcagagtacnnggtggattnnaacgacctnntttttttttttttttttttttttttttttt

SEQ ID NO: 7041 - DNA, 84 bp, Artificial
  Barcode component
  misc_feature (33)..(34): n is a, c, g, or t
  misc_feature (43)..(44): n is a, c, g, or t
  misc_feature (53)..(54): n is a, c, g, or t
tttttttaagcagtggtatcaacgcagagtacnnggtggattnnatcaggctnntttttttttttttttttttttttttttttt

SEQ ID NO: 7042 - DNA, 84 bp, Artificial
  Barcode component
  misc_feature (33)..(34): n is a, c, g, or t
  misc_feature (43)..(44): n is a, c, g, or t
  misc_feature (53)..(54): n is a, c, g, or t
tttttttaagcagtggtatcaacgcagagtacnnggtggattnncaagttcgnntttttttttttttttttttttttttttttt

SEQ ID NO: 7043 - DNA, 84 bp, Artificial
  Barcode component
  misc_feature (33)..(34): n is a, c, g, or t
  misc_feature (43)..(44): n is a, c, g, or t
  misc_feature (53)..(54): n is a, c, g, or t
tttttttaagcagtggtatcaacgcagagtacnnggtggattnntagccaganntttttttttttttttttttttttttttttt

SEQ ID NO: 7044 - DNA, 84 bp, Artificial
  Barcode component
  misc_feature (33)..(34): n is a, c, g, or t
  misc_feature (43)..(44): n is a, c, g, or t
  misc_feature (53)..(54): n is a, c, g, or t
tttttttaagcagtggtatcaacgcagagtacnnggtggattnncaatcacgnntttttttttttttttttttttttttttttt

SEQ ID NO: 7045 - DNA, 84 bp, Artificial
  Barcode component
  misc_feature (33)..(34): n is a, c, g, or t
  misc_feature (43)..(44): n is a, c, g, or t
  misc_feature (53)..(54): n is a, c, g, or t
tttttttaagcagtggtatcaacgcagagtacnnggtggattnngcaacaagnntttttttttttttttttttttttttttttt

SEQ ID NO: 7046 - DNA, 84 bp, Artificial
  Barcode component
  misc_feature (33)..(34): n is a, c, g, or t
  misc_feature (43)..(44): n is a, c, g, or t
  misc_feature (53)..(54): n is a, c, g, or t
tttttttaagcagtggtatcaacgcagagtacnnggtggattnncacgacaanntttttttttttttttttttttttttttttt

SEQ ID NO: 7047 - DNA, 84 bp, Artificial
  Barcode component
  misc_feature (33)..(34): n is a, c, g, or t
  misc_feature (43)..(44): n is a, c, g, or t
  misc_feature (53)..(54): n is a, c, g, or t
tttttttaagcagtggtatcaacgcagagtacnnggtggattnntacggaganntttttttttttttttttttttttttttttt

SEQ ID NO: 7048 - DNA, 84 bp, Artificial
  Barcode component
  misc_feature (33)..(34): n is a, c, g, or t
  misc_feature (43)..(44): n is a, c, g, or t
  misc_feature (53)..(54): n is a, c, g, or t
tttttttaagcagtggtatcaacgcagagtacnnggtggattnncgacaaganntttttttttttttttttttttttttttttt

SEQ ID NO: 7049 - DNA, 84 bp, Artificial
  Barcode component
  misc_feature (33)..(34): n is a, c, g, or t
  misc_feature (43)..(44): n is a, c, g, or t
  misc_feature (53)..(54): n is a, c, g, or t
tttttttaagcagtggtatcaacgcagagtacnnggtggattnncgaagtganntttttttttttttttttttttttttttttt

SEQ ID NO: 7050 - DNA, 84 bp, Artificial
  Barcode component
  misc_feature (33)..(34): n is a, c, g, or t
  misc_feature (43)..(44): n is a, c, g, or t
  misc_feature (53)..(54): n is a, c, g, or t
tttttttaagcagtggtatcaacgcagagtacnnggtggattnnagctggtanntttttttttttttttttttttttttttttt

SEQ ID NO: 7051 - DNA, 84 bp, Artificial
  Barcode component
  misc_feature (33)..(34): n is a, c, g, or t
  misc_feature (43)..(44): n is a, c, g, or t
  misc_feature (53)..(54): n is a, c, g, or t
tttttttaagcagtggtatcaacgcagagtacnnggtggattnnaactaggcnntttttttttttttttttttttttttttttt

SEQ ID NO: 7052 - DNA, 84 bp, Artificial
  Barcode component
  misc_feature (33)..(34): n is a, c, g, or t
  misc_feature (43)..(44): n is a, c, g, or t
  misc_feature (53)..(54): n is a, c, g, or t
tttttttaagcagtggtatcaacgcagagtacnnggtggattnncagcaagtnntttttttttttttttttttttttttttttt

SEQ ID NO: 7053 - DNA, 84 bp, Artificial
  Barcode component
  misc_feature (33)..(34): n is a, c, g, or t
  misc_feature (43)..(44): n is a, c, g, or t
  misc_feature (53)..(54): n is a, c, g, or t
tttttttaagcagtggtatcaacgcagagtacnnggtggattnnacgaggtanntttttttttttttttttttttttttttttt

SEQ ID NO: 7054 - DNA, 84 bp, Artificial
  Barcode component
  misc_feature (33)..(34): n is a, c, g, or t
  misc_feature (43)..(44): n is a, c, g, or t
  misc_feature (53)..(54): n is a, c, g, or t
tttttttaagcagtggtatcaacgcagagtacnnggtggattnncatcttccnntttttttttttttttttttttttttttttt

SEQ ID NO: 7055 - DNA, 84 bp, Artificial
  Barcode component
  misc_feature (33)..(34): n is a, c, g, or t
  misc_feature (43)..(44): n is a, c, g, or t
  misc_feature (53)..(54): n is a, c, g, or t
tttttttaagcagtggtatcaacgcagagtacnnggtggattnncctgaatcnntttttttttttttttttttttttttttttt

SEQ ID NO: 7056 - DNA, 84 bp, Artificial
  Barcode component
  misc_feature (33)..(34): n is a, c, g, or t
  misc_feature (43)..(44): n is a, c, g, or t
  misc_feature (53)..(54): n is a, c, g, or t
tttttttaagcagtggtatcaacgcagagtacnnggtggattnntgcagactnntttttttttttttttttttttttttttttt

SEQ ID NO: 7057 - DNA, 84 bp, Artificial
  Barcode component
  misc_feature (33)..(34): n is a, c, g, or t
  misc_feature (43)..(44): n is a, c, g, or t
  misc_feature (53)..(54): n is a, c, g, or t
tttttttaagcagtggtatcaacgcagagtacnnggtggattnnagatgtggnntttttttttttttttttttttttttttttt

SEQ ID NO: 7058 - DNA, 84 bp, Artificial
  Barcode component
  misc_feature (33)..(34): n is a, c, g, or t
  misc_feature (43)..(44): n is a, c, g, or t
  misc_feature (53)..(54): n is a, c, g, or t
tttttttaagcagtggtatcaacgcagagtacnnggtggattnnagttcgacnntttttttttttttttttttttttttttttt

SEQ ID NO: 7059 - DNA, 84 bp, Artificial
  Barcode component
  misc_feature (33)..(34): n is a, c, g, or t
  misc_feature (43)..(44): n is a, c, g, or t
  misc_feature (53)..(54): n is a, c, g, or t
tttttttaagcagtggtatcaacgcagagtacnnggtggattnnacaacctcnntttttttttttttttttttttttttttttt

SEQ ID NO: 7060 - DNA, 84 bp, Artificial
  Barcode component
  misc_feature (33)..(34): n is a, c, g, or t
  misc_feature (43)..(44): n is a, c, g, or t
  misc_feature (53)..(54): n is a, c, g, or t
tttttttaagcagtggtatcaacgcagagtacnnggtggattnncatggtagnntttttttttttttttttttttttttttttt

SEQ ID NO: 7061 - DNA, 84 bp, Artificial
  Barcode component
  misc_feature (33)..(34): n is a, c, g, or t
  misc_feature (43)..(44): n is a, c, g, or t
  misc_feature (53)..(54): n is a, c, g, or t
tttttttaagcagtggtatcaacgcagagtacnnggtggattnncgtatctcnntttttttttttttttttttttttttttttt

SEQ ID NO: 7062 - DNA, 84 bp, Artificial
  Barcode component
  misc_feature (33)..(34): n is a, c, g, or t
  misc_feature (43)..(44): n is a, c, g, or t
  misc_feature (53)..(54): n is a, c, g, or t
tttttttaagcagtggtatcaacgcagagtacnnggtggattnncctagttcnntttttttttttttttttttttttttttttt

SEQ ID NO: 7063 - DNA, 84 bp, Artificial
  Barcode component
  misc_feature (33)..(34): n is a, c, g, or t
  misc_feature (43)..(44): n is a, c, g, or t
  misc_feature (53)..(54): n is a, c, g, or t
tttttttaagcagtggtatcaacgcagagtacnnggtggattnncaagagtcnntttttttttttttttttttttttttttttt

SEQ ID NO: 7064 - DNA, 84 bp, Artificial
  Barcode component
  misc_feature (33)..(34): n is a, c, g, or t
  misc_feature (43)..(44): n is a, c, g, or t
  misc_feature (53)..(54): n is a, c, g, or t
tttttttaagcagtggtatcaacgcagagtacnnggctaagannaatcggcanntttttttttttttttttttttttttttttt

SEQ ID NO: 7065 - DNA, 84 bp, Artificial
  Barcode component
  misc_feature (33)..(34): n is a, c, g, or t
  misc_feature (43)..(44): n is a, c, g, or t
  misc_feature (53)..(54): n is a, c, g, or t
tttttttaagcagtggtatcaacgcagagtacnnggctaaganntacggcatnntttttttttttttttttttttttttttttt

SEQ ID NO: 7066 - DNA, 84 bp, Artificial
  Barcode component
  misc_feature (33)..(34): n is a, c, g, or t
  misc_feature (43)..(44): n is a, c, g, or t
  misc_feature (53)..(54): n is a, c, g, or t
tttttttaagcagtggtatcaacgcagagtacnnggctaagannttggatcgnntttttttttttttttttttttttttttttt

SEQ ID NO: 7067 - DNA, 84 bp, Artificial
  Barcode component
  misc_feature (33)..(34): n is a, c, g, or t
  misc_feature (43)..(44): n is a, c, g, or t
  misc_feature (53)..(54): n is a, c, g, or t
tttttttaagcagtggtatcaacgcagagtacnnggctaaganntggaacganntttttttttttttttttttttttttttttt

SEQ ID NO: 7068 - DNA, 84 bp, Artificial
  Barcode component
  misc_feature (33)..(34): n is a, c, g, or t
  misc_feature (43)..(44): n is a, c, g, or t
  misc_feature (53)..(54): n is a, c, g, or t
tttttttaagcagtggtatcaacgcagagtacnnggctaagannggcaatcanntttttttttttttttttttttttttttttt

SEQ ID NO: 7069 - DNA, 84 bp, Artificial
  Barcode component
  misc_feature (33)..(34): n is a, c, g, or t
  misc_feature (43)..(44): n is a, c, g, or t
  misc_feature (53)..(54): n is a, c, g, or t
tttttttaagcagtggtatcaacgcagagtacnnggctaaganngaatccganntttttttttttttttttttttttttttttt

SEQ ID NO: 7070 - DNA, 84 bp, Artificial
  Barcode component
  misc_feature (33)..(34): n is a, c, g, or t
  misc_feature (43)..(44): n is a, c, g, or t
  misc_feature (53)..(54): n is a, c, g, or t
tttttttaagcagtggtatcaacgcagagtacnnggctaagannttacggtgnntttttttttttttttttttttttttttttt

SEQ ID NO: 7071 - DNA, 84 bp, Artificial
  Barcode component
  misc_feature (33)..(34): n is a, c, g, or t
  misc_feature (43)..(44): n is a, c, g, or t
  misc_feature (53)..(54): n is a, c, g, or t
tttttttaagcagtggtatcaacgcagagtacnnggctaaganncatatcggnntttttttttttttttttttttttttttttt

SEQ ID NO: 7072 - DNA, 84 bp, Artificial
  Barcode component
  misc_feature (33)..(34): n is a, c, g, or t
  misc_feature (43)..(44): n is a, c, g, or t
  misc_feature (53)..(54): n is a, c, g, or t
tttttttaagcagtggtatcaacgcagagtacnnggctaaganncttcggtanntttttttttttttttttttttttttttttt

SEQ ID NO: 7073 - DNA, 84 bp, Artificial
  Barcode component
  misc_feature (33)..(34): n is a, c, g, or t
  misc_feature (43)..(44): n is a, c, g, or t
  misc_feature (53)..(54): n is a, c, g, or t
tttttttaagcagtggtatcaacgcagagtacnnggctaaganntcctaacgnntttttttttttttttttttttttttttttt

SEQ ID NO: 7074 - DNA, 84 bp, Artificial
  Barcode component
  misc_feature (33)..(34): n is a, c, g, or t
  misc_feature (43)..(44): n is a, c, g, or t
  misc_feature (53)..(54): n is a, c, g, or t
tttttttaagcagtggtatcaacgcagagtacnnggctaaganngtaagccanntttttttttttttttttttttttttttttt

SEQ ID NO: 7075 - DNA, 84 bp, Artificial
  Barcode component
  misc_feature (33)..(34): n is a, c, g, or t
  misc_feature (43)..(44): n is a, c, g, or t
  misc_feature (53)..(54): n is a, c, g, or t
tttttttaagcagtggtatcaacgcagagtacnnggctaaganntaaggtggnntttttttttttttttttttttttttttttt

SEQ ID NO: 7076 - DNA, 84 bp, Artificial
  Barcode component
  misc_feature (33)..(34): n is a, c, g, or t
  misc_feature (43)..(44): n is a, c, g, or t
  misc_feature (53)..(54): n is a, c, g, or t
tttttttaagcagtggtatcaacgcagagtacnnggctaagannggtaagctnntttttttttttttttttttttttttttttt

SEQ ID NO: 7077 - DNA, 84 bp, Artificial
  Barcode component
  misc_feature (33)..(34): n is a, c, g, or t
  misc_feature (43)..(44): n is a, c, g, or t
  misc_feature (53)..(54): n is a, c, g, or t
tttttttaagcagtggtatcaacgcagagtacnnggctaaganntgtgtcganntttttttttttttttttttttttttttttt

SEQ ID NO: 7078 - DNA, 84 bp, Artificial
  Barcode component
  misc_feature (33)..(34): n is a, c, g, or t
  misc_feature (43)..(44): n is a, c, g, or t
  misc_feature (53)..(54): n is a, c, g, or t
tttttttaagcagtggtatcaacgcagagtacnnggctaaganngagcatganntttttttttttttttttttttttttttttt

SEQ ID NO: 7079 - DNA, 84 bp, Artificial
  Barcode component
  misc_feature (33)..(34): n is a, c, g, or t
  misc_feature (43)..(44): n is a, c, g, or t
  misc_feature (53)..(54): n is a, c, g, or t
tttttttaagcagtggtatcaacgcagagtacnnggctaaganntcgaagtcnntttttttttttttttttttttttttttttt

SEQ ID NO: 7080 - DNA, 84 bp, Artificial
  Barcode component
  misc_feature (33)..(34): n is a, c, g, or t
  misc_feature (43)..(44): n is a, c, g, or t
  misc_feature (53)..(54): n is a, c, g, or t
tttttttaagcagtggtatcaacgcagagtacnnggctaagannggtgaacanntttttttttttttttttttttttttttttt

SEQ ID NO: 7081 - DNA, 84 bp, Artificial
  Barcode component
  misc_feature (33)..(34): n is a, c, g, or t
  misc_feature (43)..(44): n is a, c, g, or t
  misc_feature (53)..(54): n is a, c, g, or t
tttttttaagcagtggtatcaacgcagagtacnnggctaagannacatgcacnntttttttttttttttttttttttttttttt

SEQ ID NO: 7082 - DNA, 84 bp, Artificial
  Barcode component
  misc_feature (33)..(34): n is a, c, g, or t
  misc_feature (43)..(44): n is a, c, g, or t
  misc_feature (53)..(54): n is a, c, g, or t
tttttttaagcagtggtatcaacgcagagtacnnggctaagannccaacagtnntttttttttttttttttttttttttttttt

SEQ ID NO: 7083 - DNA, 84 bp, Artificial
  Barcode component
  misc_feature (33)..(34): n is a, c, g, or t
  misc_feature (43)..(44): n is a, c, g, or t
  misc_feature (53)..(54): n is a, c, g, or t
tttttttaagcagtggtatcaacgcagagtacnnggctaagannagaacagcnntttttttttttttttttttttttttttttt

SEQ ID NO: 7084 - DNA, 84 bp, Artificial
  Barcode component
  misc_feature (33)..(34): n is a, c, g, or t
  misc_feature (43)..(44): n is a, c, g, or t
  misc_feature (53)..(54): n is a, c, g, or t
tttttttaagcagtggtatcaacgcagagtacnnggctaaganngaacacgtnntttttttttttttttttttttttttttttt

SEQ ID NO: 7085 - DNA, 84 bp, Artificial
  Barcode component
  misc_feature (33)..(34): n is a, c, g, or t
  misc_feature (43)..(44): n is a, c, g, or t
  misc_feature (53)..(54): n is a, c, g, or t
tttttttaagcagtggtatcaacgcagagtacnnggctaagannggtcttcanntttttttttttttttttttttttttttttt

SEQ ID NO: 7086 - DNA, 84 bp, Artificial
  Barcode component
  misc_feature (33)..(34): n is a, c, g, or t
  misc_feature (43)..(44): n is a, c, g, or t
  misc_feature (53)..(54): n is a, c, g, or t
tttttttaagcagtggtatcaacgcagagtacnnggctaagannaggttcagnntttttttttttttttttttttttttttttt

SEQ ID NO: 7087 - DNA, 84 bp, Artificial
  Barcode component
  misc_feature (33)..(34): n is a, c, g, or t
  misc_feature (43)..(44): n is a, c, g, or t
  misc_feature (53)..(54): n is a, c, g, or t
tttttttaagcagtggtatcaacgcagagtacnnggctaagannctagagcanntttttttttttttttttttttttttttttt

SEQ ID NO: 7088 - DNA, 84 bp, Artificial
  Barcode component
  misc_feature (33)..(34): n is a, c, g, or t
  misc_feature (43)..(44): n is a, c, g, or t
  misc_feature (53)..(54): n is a, c, g, or t
tttttttaagcagtggtatcaacgcagagtacnnggctaaganncttctagcnntttttttttttttttttttttttttttttt

SEQ ID NO: 7089 - DNA, 84 bp, Artificial
  Barcode component
  misc_feature (33)..(34): n is a, c, g, or t
  misc_feature (43)..(44): n is a, c, g, or t
  misc_feature (53)..(54): n is a, c, g, or t
tttttttaagcagtggtatcaacgcagagtacnnggctaaganngagtaacgnntttttttttttttttttttttttttttttt

SEQ ID NO: 7090 - DNA, 84 bp, Artificial
  Barcode component
  misc_feature (33)..(34): n is a, c, g, or t
  misc_feature (43)..(44): n is a, c, g, or t
  misc_feature (53)..(54): n is a, c, g, or t
tttttttaagcagtggtatcaacgcagagtacnnggctaagannctaagaggnntttttttttttttttttttttttttttttt

SEQ ID NO: 7091 - DNA, 84 bp, Artificial
  Barcode component
  misc_feature (33)..(34): n is a, c, g, or t
  misc_feature (43)..(44): n is a, c, g, or t
  misc_feature (53)..(54): n is a, c, g, or t
tttttttaagcagtggtatcaacgcagagtacnnggctaagannacgtgtagnntttttttttttttttttttttttttttttt

SEQ ID NO: 7092 - DNA, 84 bp, Artificial
  Barcode component
  misc_feature (33)..(34): n is a, c, g, or t
  misc_feature (43)..(44): n is a, c, g, or t
  misc_feature (53)..(54): n is a, c, g, or t
tttttttaagcagtggtatcaacgcagagtacnnggctaagannactacaggnntttttttttttttttttttttttttttttt

SEQ ID NO: 7093 - DNA, 84 bp, Artificial
  Barcode component
  misc_feature (33)..(34): n is a, c, g, or t
  misc_feature (43)..(44): n is a, c, g, or t
  misc_feature (53)..(54): n is a, c, g, or t
tttttttaagcagtggtatcaacgcagagtacnnggctaaganntacaggtcnntttttttttttttttttttttttttttttt

SEQ ID NO: 7094 - DNA, 84 bp, Artificial
  Barcode component
  misc_feature (33)..(34): n is a, c, g, or t
  misc_feature (43)..(44): n is a, c, g, or t
  misc_feature (53)..(54): n is a, c, g, or t
tttttttaagcagtggtatcaacgcagagtacnnggctaagannctcacatgnntttttttttttttttttttttttttttttt

SEQ ID NO: 7095 - DNA, 84 bp, Artificial
  Barcode component
  misc_feature (33)..(34): n is a, c, g, or t
  misc_feature (43)..(44): n is a, c, g, or t
  misc_feature (53)..(54): n is a, c, g, or t
tttttttaagcagtggtatcaacgcagagtacnnggctaagannactaggagnntttttttttttttttttttttttttttttt

SEQ ID NO: 7096 - DNA, 84 bp, Artificial
  Barcode component
  misc_feature (33)..(34): n is a, c, g, or t
  misc_feature (43)..(44): n is a, c, g, or t
  misc_feature (53)..(54): n is a, c, g, or t
tttttttaagcagtggtatcaacgcagagtacnnggctaagannccatagganntttttttttttttttttttttttttttttt

SEQ ID NO: 7097 - DNA, 84 bp, Artificial
  Barcode component
  misc_feature (33)..(34): n is a, c, g, or t
  misc_feature (43)..(44): n is a, c, g, or t
  misc_feature (53)..(54): n is a, c, g, or t
tttttttaagcagtggtatcaacgcagagtacnnggctaagannggagaatcnntttttttttttttttttttttttttttttt

SEQ ID NO: 7098 - DNA, 84 bp, Artificial
  Barcode component
  misc_feature (33)..(34): n is a, c, g, or t
  misc_feature (43)..(44): n is a, c, g, or t
  misc_feature (53)..(54): n is a, c, g, or t
tttttttaagcagtggtatcaacgcagagtacnnggctaaganngccaagaanntttttttttttttttttttttttttttttt

SEQ ID NO: 7099 - DNA, 84 bp, Artificial
  Barcode component
  misc_feature (33)..(34): n is a, c, g, or t
  misc_feature (43)..(44): n is a, c, g, or t
  misc_feature (53)..(54): n is a, c, g, or t
tttttttaagcagtggtatcaacgcagagtacnnggctaagannaaggcaagnntttttttttttttttttttttttttttttt

SEQ ID NO: 7100 - DNA, 84 bp, Artificial
  Barcode component
  misc_feature (33)..(34): n is a, c, g, or t
  misc_feature (43)..(44): n is a, c, g, or t
  misc_feature (53)..(54): n is a, c, g, or t
tttttttaagcagtggtatcaacgcagagtacnnggctaagannaatgtcgcnntttttttttttttttttttttttttttttt

SEQ ID NO: 7101 - DNA, 84 bp, Artificial
  Barcode component
  misc_feature (33)..(34): n is a, c, g, or t
  misc_feature (43)..(44): n is a, c, g, or t
  misc_feature (53)..(54): n is a, c, g, or t
tttttttaagcagtggtatcaacgcagagtacnnggctaagannatggaaccnntttttttttttttttttttttttttttttt

SEQ ID NO: 7102 - DNA, 84 bp, Artificial
  Barcode component
  misc_feature (33)..(34): n is a, c, g, or t
  misc_feature (43)..(44): n is a, c, g, or t
  misc_feature (53)..(54): n is a, c, g, or t
tttttttaagcagtggtatcaacgcagagtacnnggctaagannagaggcatnntttttttttttttttttttttttttttttt

SEQ ID NO: 7103 - DNA, 84 bp, Artificial
  Barcode component
  misc_feature (33)..(34): n is a, c, g, or t
  misc_feature (43)..(44): n is a, c, g, or t
  misc_feature (53)..(54): n is a, c, g, or t
tttttttaagcagtggtatcaacgcagagtacnnggctaaganntgcatagcnntttttttttttttttttttttttttttttt

SEQ ID NO: 7104 - DNA, 84 bp, Artificial
  Barcode component
  misc_feature (33)..(34): n is a, c, g, or t
  misc_feature (43)..(44): n is a, c, g, or t
  misc_feature (53)..(54): n is a, c, g, or t
tttttttaagcagtggtatcaacgcagagtacnnggctaagannctaacgganntttttttttttttttttttttttttttttt

SEQ ID NO: 7105 - DNA, 84 bp, Artificial
  Barcode component
  misc_feature (33)..(34): n is a, c, g, or t
  misc_feature (43)..(44): n is a, c, g, or t
  misc_feature (53)..(54): n is a, c, g, or t
tttttttaagcagtggtatcaacgcagagtacnnggctaaganntatcgaggnntttttttttttttttttttttttttttttt

SEQ ID NO: 7106 - DNA, 84 bp, Artificial
  Barcode component
  misc_feature (33)..(34): n is a, c, g, or t
  misc_feature (43)..(44): n is a, c, g, or t
  misc_feature (53)..(54): n is a, c, g, or t
tttttttaagcagtggtatcaacgcagagtacnnggctaaganncatagcctnntttttttttttttttttttttttttttttt

SEQ ID NO: 7107 - DNA, 84 bp, Artificial
  Barcode component
  misc_feature (33)..(34): n is a, c, g, or t
  misc_feature (43)..(44): n is a, c, g, or t
  misc_feature (53)..(54): n is a, c, g, or t
tttttttaagcagtggtatcaacgcagagtacnnggctaagannatcgagacnntttttttttttttttttttttttttttttt

SEQ ID NO: 7108 - DNA, 84 bp, Artificial
  Barcode component
  misc_feature (33)..(34): n is a, c, g, or t
  misc_feature (43)..(44): n is a, c, g, or t
  misc_feature (53)..(54): n is a, c, g, or t
tttttttaagcagtggtatcaacgcagagtacnnggctaagannggaagagtnntttttttttttttttttttttttttttttt

SEQ ID NO: 7109 - DNA, 84 bp, Artificial
  Barcode component
  misc_feature (33)..(34): n is a, c, g, or t
  misc_feature (43)..(44): n is a, c, g, or t
  misc_feature (53)..(54): n is a, c, g, or t
tttttttaagcagtggtatcaacgcagagtacnnggctaagannccaagtagnntttttttttttttttttttttttttttttt

SEQ ID NO: 7110 - DNA, 84 bp, Artificial
  Barcode component
  misc_feature (33)..(34): n is a, c, g, or t
  misc_feature (43)..(44): n is a, c, g, or t
  misc_feature (53)..(54): n is a, c, g, or t
tttttttaagcagtggtatcaacgcagagtacnnggctaagannctgaacagnntttttttttttttttttttttttttttttt

SEQ ID NO: 7111 - DNA, 84 bp, Artificial
  Barcode component
  misc_feature (33)..(34): n is a, c, g, or t
  misc_feature (43)..(44): n is a, c, g, or t
  misc_feature (53)..(54): n is a, c, g, or t
tttttttaagcagtggtatcaacgcagagtacnnggctaaganngtaggttcnntttttttttttttttttttttttttttttt

SEQ ID NO: 7112 - DNA, 84 bp, Artificial
  Barcode component
  misc_feature (33)..(34): n is a, c, g, or t
  misc_feature (43)..(44): n is a, c, g, or t
  misc_feature (53)..(54): n is a, c, g, or t
tttttttaagcagtggtatcaacgcagagtacnnggctaaganngtatggacnntttttttttttttttttttttttttttttt

SEQ ID NO: 7113 - DNA, 84 bp, Artificial
  Barcode component
  misc_feature (33)..(34): n is a, c, g, or t
  misc_feature (43)..(44): n is a, c, g, or t
  misc_feature (53)..(54): n is a, c, g, or t
tttttttaagcagtggtatcaacgcagagtacnnggctaaganntcgcaacanntttttttttttttttttttttttttttttt

SEQ ID NO: 7114 - DNA, 84 bp, Artificial
  Barcode component
  misc_feature (33)..(34): n is a, c, g, or t
  misc_feature (43)..(44): n is a, c, g, or t
  misc_feature (53)..(54): n is a, c, g, or t
tttttttaagcagtggtatcaacgcagagtacnnggctaagannccgctaatnntttttttttttttttttttttttttttttt

SEQ ID NO: 7115 - DNA, 84 bp, Artificial
  Barcode component
  misc_feature (33)..(34): n is a, c, g, or t
  misc_feature (43)..(44): n is a, c, g, or t
  misc_feature (53)..(54): n is a, c, g, or t
tttttttaagcagtggtatcaacgcagagtacnnggctaaganngattcgcanntttttttttttttttttttttttttttttt

SEQ ID NO: 7116 - DNA, 84 bp, Artificial
  Barcode component
  misc_feature (33)..(34): n is a, c, g, or t
  misc_feature (43)..(44): n is a, c, g, or t
  misc_feature (53)..(54): n is a, c, g, or t
tttttttaagcagtggtatcaacgcagagtacnnggctaaganncgatggaanntttttttttttttttttttttttttttttt

SEQ ID NO: 7117 - DNA, 84 bp, Artificial
  Barcode component
  misc_feature (33)..(34): n is a, c, g, or t
  misc_feature (43)..(44): n is a, c, g, or t
  misc_feature (53)..(54): n is a, c, g, or t
tttttttaagcagtggtatcaacgcagagtacnnggctaagannagcaagganntttttttttttttttttttttttttttttt

SEQ ID NO: 7118 - DNA, 84 bp, Artificial
  Barcode component
  misc_feature (33)..(34): n is a, c, g, or t
  misc_feature (43)..(44): n is a, c, g, or t
  misc_feature (53)..(54): n is a, c, g, or t
tttttttaagcagtggtatcaacgcagagtacnnggctaaganncgtagcaanntttttttttttttttttttttttttttttt

SEQ ID NO: 7119 - DNA, 84 bp, Artificial
  Barcode component
  misc_feature (33)..(34): n is a, c, g, or t
  misc_feature (43)..(44): n is a, c, g, or t
  misc_feature (53)..(54): n is a, c, g, or t
tttttttaagcagtggtatcaacgcagagtacnnggctaaganntggcagtanntttttttttttttttttttttttttttttt

SEQ ID NO: 7120 - DNA, 84 bp, Artificial
  Barcode component
  misc_feature (33)..(34): n is a, c, g, or t
  misc_feature (43)..(44): n is a, c, g, or t
  misc_feature (53)..(54): n is a, c, g, or t
tttttttaagcagtggtatcaacgcagagtacnnggctaaganncggtagttnntttttttttttttttttttttttttttttt

SEQ ID NO: 7121 - DNA, 84 bp, Artificial
  Barcode component
  misc_feature (33)..(34): n is a, c, g, or t
  misc_feature (43)..(44): n is a, c, g, or t
  misc_feature (53)..(54): n is a, c, g, or t
tttttttaagcagtggtatcaacgcagagtacnnggctaaganntgacttcgnntttttttttttttttttttttttttttttt

SEQ ID NO: 7122 - DNA, 84 bp, Artificial
  Barcode component
  misc_feature (33)..(34): n is a, c, g, or t
  misc_feature (43)..(44): n is a, c, g, or t
  misc_feature (53)..(54): n is a, c, g, or t
tttttttaagcagtggtatcaacgcagagtacnnggctaaganngagtgcaanntttttttttttttttttttttttttttttt

SEQ ID NO: 7123 - DNA, 84 bp, Artificial
  Barcode component
  misc_feature (33)..(34): n is a, c, g, or t
  misc_feature (43)..(44): n is a, c, g, or t
  misc_feature (53)..(54): n is a, c, g, or t
tttttttaagcagtggtatcaacgcagagtacnnggctaagannacggtaacnntttttttttttttttttttttttttttttt

SEQ ID NO: 7124 - DNA, 84 bp, Artificial
  Barcode component
  misc_feature (33)..(34): n is a, c, g, or t
  misc_feature (43)..(44): n is a, c, g, or t
  misc_feature (53)..(54): n is a, c, g, or t
tttttttaagcagtggtatcaacgcagagtacnnggctaagannaagtggtgnntttttttttttttttttttttttttttttt

SEQ ID NO: 7125 - DNA, 84 bp, Artificial
  Barcode component
  misc_feature (33)..(34): n is a, c, g, or t
  misc_feature (43)..(44): n is a, c, g, or t
  misc_feature (53)..(54): n is a, c, g, or t
tttttttaagcagtggtatcaacgcagagtacnnggctaagannggagacaanntttttttttttttttttttttttttttttt

SEQ ID NO: 7126 - DNA, 84 bp, Artificial
  Barcode component
  misc_feature (33)..(34): n is a, c, g, or t
  misc_feature (43)..(44): n is a, c, g, or t
  misc_feature (53)..(54): n is a, c, g, or t
tttttttaagcagtggtatcaacgcagagtacnnggctaaganntcaaggacnntttttttttttttttttttttttttttttt

SEQ ID NO: 7127 - DNA, 84 bp, Artificial
  Barcode component
  misc_feature (33)..(34): n is a, c, g, or t
  misc_feature (43)..(44): n is a, c, g, or t
  misc_feature (53)..(54): n is a, c, g, or t
tttttttaagcagtggtatcaacgcagagtacnnggctaagannaagagagcnntttttttttttttttttttttttttttttt

SEQ ID NO: 7128 - DNA, 84 bp, Artificial
  Barcode component
  misc_feature (33)..(34): n is a, c, g, or t
  misc_feature (43)..(44): n is a, c, g, or t
  misc_feature (53)..(54): n is a, c, g, or t
tttttttaagcagtggtatcaacgcagagtacnnggctaaganncgagagatnntttttttttttttttttttttttttttttt

SEQ ID NO: 7129 - DNA, 84 bp, Artificial
  Barcode component
  misc_feature (33)..(34): n is a, c, g, or t
  misc_feature (43)..(44): n is a, c, g, or t
  misc_feature (53)..(54): n is a, c, g, or t
tttttttaagcagtggtatcaacgcagagtacnnggctaagannacagatggnntttttttttttttttttttttttttttttt

SEQ ID NO: 7130 - DNA, 84 bp, Artificial
  Barcode component
  misc_feature (33)..(34): n is a, c, g, or t
  misc_feature (43)..(44): n is a, c, g, or t
  misc_feature (53)..(54): n is a, c, g, or t
tttttttaagcagtggtatcaacgcagagtacnnggctaagannaggagtcanntttttttttttttttttttttttttttttt

SEQ ID NO: 7131 - DNA, 84 bp, Artificial
  Barcode component
  misc_feature (33)..(34): n is a, c, g, or t
  misc_feature (43)..(44): n is a, c, g, or t
  misc_feature (53)..(54): n is a, c, g, or t
tttttttaagcagtggtatcaacgcagagtacnnggctaaganncgtgttacnntttttttttttttttttttttttttttttt

SEQ ID NO: 7132 - DNA, 84 bp, Artificial
  Barcode component
  misc_feature (33)..(34): n is a, c, g, or t
  misc_feature (43)..(44): n is a, c, g, or t
  misc_feature (53)..(54): n is a, c, g, or t
tttttttaagcagtggtatcaacgcagagtacnnggctaaganntagtgtgcnntttttttttttttttttttttttttttttt

SEQ ID NO: 7133 - DNA, 84 bp, Artificial
  Barcode component
  misc_feature (33)..(34): n is a, c, g, or t
  misc_feature (43)..(44): n is a, c, g, or t
  misc_feature (53)..(54): n is a, c, g, or t
tttttttaagcagtggtatcaacgcagagtacnnggctaagannctcatgacnntttttttttttttttttttttttttttttt

SEQ ID NO: 7134 - DNA, 84 bp, Artificial
  Barcode component
  misc_feature (33)..(34): n is a, c, g, or t
  misc_feature (43)..(44): n is a, c, g, or t
  misc_feature (53)..(54): n is a, c, g, or t
tttttttaagcagtggtatcaacgcagagtacnnggctaaganngtatccagnntttttttttttttttttttttttttttttt

SEQ ID NO: 7135 - DNA, 84 bp, Artificial
  Barcode component
  misc_feature (33)..(34): n is a, c, g, or t
  misc_feature (43)..(44): n is a, c, g, or t
  misc_feature (53)..(54): n is a, c, g, or t
tttttttaagcagtggtatcaacgcagagtacnnggctaagannacgcctatnntttttttttttttttttttttttttttttt

SEQ ID NO: 7136 - DNA, 84 bp, Artificial
  Barcode component
  misc_feature (33)..(34): n is a, c, g, or t
  misc_feature (43)..(44): n is a, c, g, or t
  misc_feature (53)..(54): n is a, c, g, or t
tttttttaagcagtggtatcaacgcagagtacnnggctaagannaacgacctnntttttttttttttttttttttttttttttt

SEQ ID NO: 7137 - DNA, 84 bp, Artificial
  Barcode component
  misc_feature (33)..(34): n is a, c, g, or t
  misc_feature (43)..(44): n is a, c, g, or t
  misc_feature (53)..(54): n is a, c, g, or t
tttttttaagcagtggtatcaacgcagagtacnnggctaagannatcaggctnntttttttttttttttttttttttttttttt

SEQ ID NO: 7138 - DNA, 84 bp, Artificial
  Barcode component
  misc_feature (33)..(34): n is a, c, g, or t
  misc_feature (43)..(44): n is a, c, g, or t
  misc_feature (53)..(54): n is a, c, g, or t
tttttttaagcagtggtatcaacgcagagtacnnggctaaganncaagttcgnntttttttttttttttttttttttttttttt

SEQ ID NO: 7139 - DNA, 84 bp, Artificial
  Barcode component
  misc_feature (33)..(34): n is a, c, g, or t
  misc_feature (43)..(44): n is a, c, g, or t
  misc_feature (53)..(54): n is a, c, g, or t
tttttttaagcagtggtatcaacgcagagtacnnggctaaganntagccaganntttttttttttttttttttttttttttttt

SEQ ID NO: 7140 - DNA, 84 bp, Artificial
  Barcode component
  misc_feature (33)..(34): n is a, c, g, or t
  misc_feature (43)..(44): n is a, c, g, or t
  misc_feature (53)..(54): n is a, c, g, or t
tttttttaagcagtggtatcaacgcagagtacnnggctaaganncaatcacgnntttttttttttttttttttttttttttttt

SEQ ID NO: 7141 - DNA, 84 bp, Artificial
  Barcode component
  misc_feature (33)..(34): n is a, c, g, or t
  misc_feature (43)..(44): n is a, c, g, or t
  misc_feature (53)..(54): n is a, c, g, or t
tttttttaagcagtggtatcaacgcagagtacnnggctaaganngcaacaagnntttttttttttttttttttttttttttttt

SEQ ID NO: 7142 - DNA, 84 bp, Artificial
  Barcode component
  misc_feature (33)..(34): n is a, c, g, or t
  misc_feature (43)..(44): n is a, c, g, or t
  misc_feature (53)..(54): n is a, c, g, or t
tttttttaagcagtggtatcaacgcagagtacnnggctaaganncacgacaanntttttttttttttttttttttttttttttt

SEQ ID NO: 7143 - DNA, 84 bp, Artificial
  Barcode component
  misc_feature (33)..(34): n is a, c, g, or t
  misc_feature (43)..(44): n is a, c, g, or t
  misc_feature (53)..(54): n is a, c, g, or t
tttttttaagcagtggtatcaacgcagagtacnnggctaaganntacggaganntttttttttttttttttttttttttttttt

SEQ ID NO: 7144 - DNA, 84 bp, Artificial
  Barcode component
  misc_feature (33)..(34): n is a, c, g, or t
  misc_feature (43)..(44): n is a, c, g, or t
  misc_feature (53)..(54): n is a, c, g, or t
tttttttaagcagtggtatcaacgcagagtacnnggctaaganncgacaaganntttttttttttttttttttttttttttttt

SEQ ID NO: 7145 - DNA, 84 bp, Artificial
  Barcode component
  misc_feature (33)..(34): n is a, c, g, or t
  misc_feature (43)..(44): n is a, c, g, or t
  misc_feature (53)..(54): n is a, c, g, or t
tttttttaagcagtggtatcaacgcagagtacnnggctaaganncgaagtganntttttttttttttttttttttttttttttt

SEQ ID NO: 7146 - DNA, 84 bp, Artificial
  Barcode component
  misc_feature (33)..(34): n is a, c, g, or t
  misc_feature (43)..(44): n is a, c, g, or t
  misc_feature (53)..(54): n is a, c, g, or t
tttttttaagcagtggtatcaacgcagagtacnnggctaagannagctggtanntttttttttttttttttttttttttttttt

SEQ ID NO: 7147 - DNA, 84 bp, Artificial
  Barcode component
  misc_feature (33)..(34): n is a, c, g, or t
  misc_feature (43)..(44): n is a, c, g, or t
  misc_feature (53)..(54): n is a, c, g, or t
tttttttaagcagtggtatcaacgcagagtacnnggctaagannaactaggcnntttttttttttttttttttttttttttttt

SEQ ID NO: 7148 - DNA, 84 bp, Artificial
  Barcode component
  misc_feature (33)..(34): n is a, c, g, or t
  misc_feature (43)..(44): n is a, c, g, or t
  misc_feature (53)..(54): n is a, c, g, or t
tttttttaagcagtggtatcaacgcagagtacnnggctaaganncagcaagtnntttttttttttttttttttttttttttttt

SEQ ID NO: 7149 - DNA, 84 bp, Artificial
  Barcode component
  misc_feature (33)..(34): n is a, c, g, or t
  misc_feature (43)..(44): n is a, c, g, or t
  misc_feature (53)..(54): n is a, c, g, or t
tttttttaagcagtggtatcaacgcagagtacnnggctaagannacgaggtanntttttttttttttttttttttttttttttt

SEQ ID NO: 7150 - DNA, 84 bp, Artificial
  Barcode component
  misc_feature (33)..(34): n is a, c, g, or t
  misc_feature (43)..(44): n is a, c, g, or t
  misc_feature (53)..(54): n is a, c, g, or t
tttttttaagcagtggtatcaacgcagagtacnnggctaaganncatcttccnntttttttttttttttttttttttttttttt

SEQ ID NO: 7151 - DNA, 84 bp, Artificial
  Barcode component
  misc_feature (33)..(34): n is a, c, g, or t
  misc_feature (43)..(44): n is a, c, g, or t
  misc_feature (53)..(54): n is a, c, g, or t
tttttttaagcagtggtatcaacgcagagtacnnggctaaganncctgaatcnntttttttttttttttttttttttttttttt

SEQ ID NO: 7152 - DNA, 84 bp, Artificial
  Barcode component
  misc_feature (33)..(34): n is a, c, g, or t
  misc_feature (43)..(44): n is a, c, g, or t
  misc_feature (53)..(54): n is a, c, g, or t
tttttttaagcagtggtatcaacgcagagtacnnggctaaganntgcagactnntttttttttttttttttttttttttttttt

SEQ ID NO: 7153 - DNA, 84 bp, Artificial
  Barcode component
  misc_feature (33)..(34): n is a, c, g, or t
  misc_feature (43)..(44): n is a, c, g, or t
  misc_feature (53)..(54): n is a, c, g, or t
tttttttaagcagtggtatcaacgcagagtacnnggctaagannagatgtggnntttttttttttttttttttttttttttttt

SEQ ID NO: 7154 - DNA, 84 bp, Artificial
  Barcode component
  misc_feature (33)..(34): n is a, c, g, or t
  misc_feature (43)..(44): n is a, c, g, or t
  misc_feature (53)..(54): n is a, c, g, or t
tttttttaagcagtggtatcaacgcagagtacnnggctaagannagttcgacnntttttttttttttttttttttttttttttt

SEQ ID NO: 7155 - DNA, 84 bp, Artificial
  Barcode component
  misc_feature (33)..(34): n is a, c, g, or t
  misc_feature (43)..(44): n is a, c, g, or t
  misc_feature (53)..(54): n is a, c, g, or t
tttttttaagcagtggtatcaacgcagagtacnnggctaagannacaacctcnntttttttttttttttttttttttttttttt

SEQ ID NO: 7156 - DNA, 84 bp, Artificial
  Barcode component
  misc_feature (33)..(34): n is a, c, g, or t
  misc_feature (43)..(44): n is a, c, g, or t
  misc_feature (53)..(54): n is a, c, g, or t
tttttttaagcagtggtatcaacgcagagtacnnggctaaganncatggtagnntttttttttttttttttttttttttttttt

SEQ ID NO: 7157 - DNA, 84 bp, Artificial
  Barcode component
  misc_feature (33)..(34): n is a, c, g, or t
  misc_feature (43)..(44): n is a, c, g, or t
  misc_feature (53)..(54): n is a, c, g, or t
tttttttaagcagtggtatcaacgcagagtacnnggctaaganncgtatctcnntttttttttttttttttttttttttttttt

SEQ ID NO: 7158 - DNA, 84 bp, Artificial
  Barcode component
  misc_feature (33)..(34): n is a, c, g, or t
  misc_feature (43)..(44): n is a, c, g, or t
  misc_feature (53)..(54): n is a, c, g, or t
tttttttaagcagtggtatcaacgcagagtacnnggctaaganncctagttcnntttttttttttttttttttttttttttttt

SEQ ID NO: 7159 - DNA, 84 bp, Artificial
  Barcode component
  misc_feature (33)..(34): n is a, c, g, or t
  misc_feature (43)..(44): n is a, c, g, or t
  misc_feature (53)..(54): n is a, c, g, or t
tttttttaagcagtggtatcaacgcagagtacnnggctaaganncaagagtcnntttttttttttttttttttttttttttttt

SEQ ID NO: 7160 - DNA, 84 bp, Artificial
  Barcode component
  misc_feature (33)..(34): n is a, c, g, or t
  misc_feature (43)..(44): n is a, c, g, or t
  misc_feature (53)..(54): n is a, c, g, or t
tttttttaagcagtggtatcaacgcagagtacnnttagaggcnnaatcggcanntttttttttttttttttttttttttttttt

SEQ ID NO: 7161 - DNA, 84 bp, Artificial
  Barcode component
  misc_feature (33)..(34): n is a, c, g, or t
  misc_feature (43)..(44): n is a, c, g, or t
  misc_feature (53)..(54): n is a, c, g, or t
tttttttaagcagtggtatcaacgcagagtacnnttagaggcnntacggcatnntttttttttttttttttttttttttttttt

SEQ ID NO: 7162 - DNA, 84 bp, Artificial
  Barcode component
  misc_feature (33)..(34): n is a, c, g, or t
  misc_feature (43)..(44): n is a, c, g, or t
  misc_feature (53)..(54): n is a, c, g, or t
tttttttaagcagtggtatcaacgcagagtacnnttagaggcnnttggatcgnntttttttttttttttttttttttttttttt

SEQ ID NO: 7163 - DNA, 84 bp, Artificial
  Barcode component
  misc_feature (33)..(34): n is a, c, g, or t
  misc_feature (43)..(44): n is a, c, g, or t
  misc_feature (53)..(54): n is a, c, g, or t
tttttttaagcagtggtatcaacgcagagtacnnttagaggcnntggaacganntttttttttttttttttttttttttttttt

SEQ ID NO: 7164 - DNA, 84 bp, Artificial
  Barcode component
  misc_feature (33)..(34): n is a, c, g, or t
  misc_feature (43)..(44): n is a, c, g, or t
  misc_feature (53)..(54): n is a, c, g, or t
tttttttaagcagtggtatcaacgcagagtacnnttagaggcnnggcaatcanntttttttttttttttttttttttttttttt

SEQ ID NO: 7165 - DNA, 84 bp, Artificial
  Barcode component
  misc_feature (33)..(34): n is a, c, g, or t
  misc_feature (43)..(44): n is a, c, g, or t
  misc_feature (53)..(54): n is a, c, g, or t
tttttttaagcagtggtatcaacgcagagtacnnttagaggcnngaatccganntttttttttttttttttttttttttttttt

SEQ ID NO: 7166 - DNA, 84 bp, Artificial
  Barcode component
  misc_feature (33)..(34): n is a, c, g, or t
  misc_feature (43)..(44): n is a, c, g, or t
  misc_feature (53)..(54): n is a, c, g, or t
tttttttaagcagtggtatcaacgcagagtacnnttagaggcnnttacggtgnntttttttttttttttttttttttttttttt

SEQ ID NO: 7167 - DNA, 84 bp, Artificial
  Barcode component
  misc_feature (33)..(34): n is a, c, g, or t
  misc_feature (43)..(44): n is a, c, g, or t
  misc_feature (53)..(54): n is a, c, g, or t
tttttttaagcagtggtatcaacgcagagtacnnttagaggcnncatatcggnntttttttttttttttttttttttttttttt

SEQ ID NO: 7168 - DNA, 84 bp, Artificial
  Barcode component
  misc_feature (33)..(34): n is a, c, g, or t
  misc_feature (43)..(44): n is a, c, g, or t
  misc_feature (53)..(54): n is a, c, g, or t
tttttttaagcagtggtatcaacgcagagtacnnttagaggcnncttcggtanntttttttttttttttttttttttttttttt

SEQ ID NO: 7169 - DNA, 84 bp, Artificial
  Barcode component
  misc_feature (33)..(34): n is a, c, g, or t
  misc_feature (43)..(44): n is a, c, g, or t
  misc_feature (53)..(54): n is a, c, g, or t
tttttttaagcagtggtatcaacgcagagtacnnttagaggcnntcctaacgnntttttttttttttttttttttttttttttt

SEQ ID NO: 7170 - DNA, 84 bp, Artificial
  Barcode component
  misc_feature (33)..(34): n is a, c, g, or t
  misc_feature (43)..(44): n is a, c, g, or t
  misc_feature (53)..(54): n is a, c, g, or t
tttttttaagcagtggtatcaacgcagagtacnnttagaggcnngtaagccanntttttttttttttttttttttttttttttt

SEQ ID NO: 7171 - DNA, 84 bp, Artificial
  Barcode component
  misc_feature (33)..(34): n is a, c, g, or t
  misc_feature (43)..(44): n is a, c, g, or t
  misc_feature (53)..(54): n is a, c, g, or t
tttttttaagcagtggtatcaacgcagagtacnnttagaggcnntaaggtggnntttttttttttttttttttttttttttttt

SEQ ID NO: 7172 - DNA, 84 bp, Artificial
  Barcode component
  misc_feature (33)..(34): n is a, c, g, or t
  misc_feature (43)..(44): n is a, c, g, or t
  misc_feature (53)..(54): n is a, c, g, or t
tttttttaagcagtggtatcaacgcagagtacnnttagaggcnnggtaagctnntttttttttttttttttttttttttttttt

SEQ ID NO: 7173 - DNA, 84 bp, Artificial
  Barcode component
  misc_feature (33)..(34): n is a, c, g, or t
  misc_feature (43)..(44): n is a, c, g, or t
  misc_feature (53)..(54): n is a, c, g, or t
tttttttaagcagtggtatcaacgcagagtacnnttagaggcnntgtgtcganntttttttttttttttttttttttttttttt

SEQ ID NO: 7174 - DNA, 84 bp, Artificial
  Barcode component
  misc_feature (33)..(34): n is a, c, g, or t
  misc_feature (43)..(44): n is a, c, g, or t
  misc_feature (53)..(54): n is a, c, g, or t
tttttttaagcagtggtatcaacgcagagtacnnttagaggcnngagcatganntttttttttttttttttttttttttttttt

SEQ ID NO: 7175 - DNA, 84 bp, Artificial
  Barcode component
  misc_feature (33)..(34): n is a, c, g, or t
  misc_feature (43)..(44): n is a, c, g, or t
  misc_feature (53)..(54): n is a, c, g, or t
tttttttaagcagtggtatcaacgcagagtacnnttagaggcnntcgaagtcnntttttttttttttttttttttttttttttt

SEQ ID NO: 7176 - DNA, 84 bp, Artificial
  Barcode component
  misc_feature (33)..(34): n is a, c, g, or t
  misc_feature (43)..(44): n is a, c, g, or t
  misc_feature (53)..(54): n is a, c, g, or t
tttttttaagcagtggtatcaacgcagagtacnnttagaggcnnggtgaacanntttttttttttttttttttttttttttttt

SEQ ID NO: 7177 - DNA, 84 bp, Artificial
  Barcode component
  misc_feature (33)..(34): n is a, c, g, or t
  misc_feature (43)..(44): n is a, c, g, or t
  misc_feature (53)..(54): n is a, c, g, or t
tttttttaagcagtggtatcaacgcagagtacnnttagaggcnnacatgcacnntttttttttttttttttttttttttttttt

SEQ ID NO: 7178 - DNA, 84 bp, Artificial
  Barcode component
  misc_feature (33)..(34): n is a, c, g, or t
  misc_feature (43)..(44): n is a, c, g, or t
  misc_feature (53)..(54): n is a, c, g, or t
tttttttaagcagtggtatcaacgcagagtacnnttagaggcnnccaacagtnntttttttttttttttttttttttttttttt

SEQ ID NO: 7179 - DNA, 84 bp, Artificial
  Barcode component
  misc_feature (33)..(34): n is a, c, g, or t
  misc_feature (43)..(44): n is a, c, g, or t
  misc_feature (53)..(54): n is a, c, g, or t
tttttttaagcagtggtatcaacgcagagtacnnttagaggcnnagaacagcnntttttttttttttttttttttttttttttt

SEQ ID NO: 7180 - DNA, 84 bp, Artificial
  Barcode component
  misc_feature (33)..(34): n is a, c, g, or t
  misc_feature (43)..(44): n is a, c, g, or t
  misc_feature (53)..(54): n is a, c, g, or t
tttttttaagcagtggtatcaacgcagagtacnnttagaggcnngaacacgtnntttttttttttttttttttttttttttttt

SEQ ID NO: 7181 - DNA, 84 bp, Artificial
  Barcode component
  misc_feature (33)..(34): n is a, c, g, or t
  misc_feature (43)..(44): n is a, c, g, or t
  misc_feature (53)..(54): n is a, c, g, or t
tttttttaagcagtggtatcaacgcagagtacnnttagaggcnnggtcttcanntttttttttttttttttttttttttttttt

SEQ ID NO: 7182 - DNA, 84 bp, Artificial
  Barcode component
  misc_feature (33)..(34): n is a, c, g, or t
  misc_feature (43)..(44): n is a, c, g, or t
  misc_feature (53)..(54): n is a, c, g, or t
tttttttaagcagtggtatcaacgcagagtacnnttagaggcnnaggttcagnntttttttttttttttttttttttttttttt

SEQ ID NO: 7183 - DNA, 84 bp, Artificial
  Barcode component
  misc_feature (33)..(34): n is a, c, g, or t
  misc_feature (43)..(44): n is a, c, g, or t
  misc_feature (53)..(54): n is a, c, g, or t
tttttttaagcagtggtatcaacgcagagtacnnttagaggcnnctagagcanntttttttttttttttttttttttttttttt

SEQ ID NO: 7184 - DNA, 84 bp, Artificial
  Barcode component
  misc_feature (33)..(34): n is a, c, g, or t
  misc_feature (43)..(44): n is a, c, g, or t
  misc_feature (53)..(54): n is a, c, g, or t
tttttttaagcagtggtatcaacgcagagtacnnttagaggcnncttctagcnntttttttttttttttttttttttttttttt

SEQ ID NO: 7185 - DNA, 84 bp, Artificial
  Barcode component
  misc_feature (33)..(34): n is a, c, g, or t
  misc_feature (43)..(44): n is a, c, g, or t
  misc_feature (53)..(54): n is a, c, g, or t
tttttttaagcagtggtatcaacgcagagtacnnttagaggcnngagtaacgnntttttttttttttttttttttttttttttt

SEQ ID NO: 7186 - DNA, 84 bp, Artificial
  Barcode component
  misc_feature (33)..(34): n is a, c, g, or t
  misc_feature (43)..(44): n is a, c, g, or t
  misc_feature (53)..(54): n is a, c, g, or t
tttttttaagcagtggtatcaacgcagagtacnnttagaggcnnctaagaggnntttttttttttttttttttttttttttttt

SEQ ID NO: 7187 - DNA, 84 bp, Artificial
  Barcode component
  misc_feature (33)..(34): n is a, c, g, or t
  misc_feature (43)..(44): n is a, c, g, or t
  misc_feature (53)..(54): n is a, c, g, or t
tttttttaagcagtggtatcaacgcagagtacnnttagaggcnnacgtgtagnntttttttttttttttttttttttttttttt

SEQ ID NO: 7188 - DNA, 84 bp, Artificial
  Barcode component
  misc_feature (33)..(34): n is a, c, g, or t
  misc_feature (43)..(44): n is a, c, g, or t
  misc_feature (53)..(54): n is a, c, g, or t
tttttttaagcagtggtatcaacgcagagtacnnttagaggcnnactacaggnntttttttttttttttttttttttttttttt

SEQ ID NO: 7189 - DNA, 84 bp, Artificial
  Barcode component
  misc_feature (33)..(34): n is a, c, g, or t
  misc_feature (43)..(44): n is a, c, g, or t
  misc_feature (53)..(54): n is a, c, g, or t
tttttttaagcagtggtatcaacgcagagtacnnttagaggcnntacaggtcnntttttttttttttttttttttttttttttt

SEQ ID NO: 7190 - DNA, 84 bp, Artificial
  Barcode component
  misc_feature (33)..(34): n is a, c, g, or t
  misc_feature (43)..(44): n is a, c, g, or t
  misc_feature (53)..(54): n is a, c, g, or t
tttttttaagcagtggtatcaacgcagagtacnnttagaggcnnctcacatgnntttttttttttttttttttttttttttttt

SEQ ID NO: 7191 - DNA, 84 bp, Artificial
  Barcode component
  misc_feature (33)..(34): n is a, c, g, or t
  misc_feature (43)..(44): n is a, c, g, or t
  misc_feature (53)..(54): n is a, c, g, or t
tttttttaagcagtggtatcaacgcagagtacnnttagaggcnnactaggagnntttttttttttttttttttttttttttttt

SEQ ID NO: 7192 - DNA, 84 bp, Artificial
  Barcode component
  misc_feature (33)..(34): n is a, c, g, or t
  misc_feature (43)..(44): n is a, c, g, or t
  misc_feature (53)..(54): n is a, c, g, or t
tttttttaagcagtggtatcaacgcagagtacnnttagaggcnnccatagganntttttttttttttttttttttttttttttt

SEQ ID NO: 7193 - DNA, 84 bp, Artificial
  Barcode component
  misc_feature (33)..(34): n is a, c, g, or t
  misc_feature (43)..(44): n is a, c, g, or t
  misc_feature (53)..(54): n is a, c, g, or t
tttttttaagcagtggtatcaacgcagagtacnnttagaggcnnggagaatcnntttttttttttttttttttttttttttttt

SEQ ID NO: 7194 - DNA, 84 bp, Artificial
  Barcode component
  misc_feature (33)..(34): n is a, c, g, or t
  misc_feature (43)..(44): n is a, c, g, or t
  misc_feature (53)..(54): n is a, c, g, or t
tttttttaagcagtggtatcaacgcagagtacnnttagaggcnngccaagaanntttttttttttttttttttttttttttttt

SEQ ID NO: 7195 - DNA, 84 bp, Artificial
  Barcode component
  misc_feature (33)..(34): n is a, c, g, or t
  misc_feature (43)..(44): n is a, c, g, or t
  misc_feature (53)..(54): n is a, c, g, or t
tttttttaagcagtggtatcaacgcagagtacnnttagaggcnnaaggcaagnntttttttttttttttttttttttttttttt

SEQ ID NO: 7196 - DNA, 84 bp, Artificial
  Barcode component
  misc_feature (33)..(34): n is a, c, g, or t
  misc_feature (43)..(44): n is a, c, g, or t
  misc_feature (53)..(54): n is a, c, g, or t
tttttttaagcagtggtatcaacgcagagtacnnttagaggcnnaatgtcgcnntttttttttttttttttttttttttttttt

SEQ ID NO: 7197 - DNA, 84 bp, Artificial
  Barcode component
  misc_feature (33)..(34): n is a, c, g, or t
  misc_feature (43)..(44): n is a, c, g, or t
  misc_feature (53)..(54): n is a, c, g, or t
tttttttaagcagtggtatcaacgcagagtacnnttagaggcnnatggaaccnntttttttttttttttttttttttttttttt

SEQ ID NO: 7198 - DNA, 84 bp, Artificial
  Barcode component
  misc_feature (33)..(34): n is a, c, g, or t
  misc_feature (43)..(44): n is a, c, g, or t
  misc_feature (53)..(54): n is a, c, g, or t
tttttttaagcagtggtatcaacgcagagtacnnttagaggcnnagaggcatnntttttttttttttttttttttttttttttt

SEQ ID NO: 7199 - DNA, 84 bp, Artificial
  Barcode component
  misc_feature (33)..(34): n is a, c, g, or t
  misc_feature (43)..(44): n is a, c, g, or t
  misc_feature (53)..(54): n is a, c, g, or t
tttttttaagcagtggtatcaacgcagagtacnnttagaggcnntgcatagcnntttttttttttttttttttttttttttttt

SEQ ID NO: 7200 - DNA, 84 bp, Artificial
  Barcode component
  misc_feature (33)..(34): n is a, c, g, or t
  misc_feature (43)..(44): n is a, c, g, or t
  misc_feature (53)..(54): n is a, c, g, or t
tttttttaagcagtggtatcaacgcagagtacnnttagaggcnnctaacgganntttttttttttttttttttttttttttttt

SEQ ID NO: 7201 - DNA, 84 bp, Artificial
  Barcode component
  misc_feature (33)..(34): n is a, c, g, or t
  misc_feature (43)..(44): n is a, c, g, or t
  misc_feature (53)..(54): n is a, c, g, or t
tttttttaagcagtggtatcaacgcagagtacnnttagaggcnntatcgaggnntttttttttttttttttttttttttttttt

SEQ ID NO: 7202 - DNA, 84 bp, Artificial
  Barcode component
  misc_feature (33)..(34): n is a, c, g, or t
  misc_feature (43)..(44): n is a, c, g, or t
  misc_feature (53)..(54): n is a, c, g, or t
tttttttaagcagtggtatcaacgcagagtacnnttagaggcnncatagcctnntttttttttttttttttttttttttttttt

SEQ ID NO: 7203 - DNA, 84 bp, Artificial
  Barcode component
  misc_feature (33)..(34): n is a, c, g, or t
  misc_feature (43)..(44): n is a, c, g, or t
  misc_feature (53)..(54): n is a, c, g, or t
tttttttaagcagtggtatcaacgcagagtacnnttagaggcnnatcgagacnntttttttttttttttttttttttttttttt

SEQ ID NO: 7204 - DNA, 84 bp, Artificial
  Barcode component
  misc_feature (33)..(34): n is a, c, g, or t
  misc_feature (43)..(44): n is a, c, g, or t
  misc_feature (53)..(54): n is a, c, g, or t
tttttttaagcagtggtatcaacgcagagtacnnttagaggcnnggaagagtnntttttttttttttttttttttttttttttt

SEQ ID NO: 7205 - DNA, 84 bp, Artificial
  Barcode component
  misc_feature (33)..(34): n is a, c, g, or t
  misc_feature (43)..(44): n is a, c, g, or t
  misc_feature (53)..(54): n is a, c, g, or t
tttttttaagcagtggtatcaacgcagagtacnnttagaggcnnccaagtagnntttttttttttttttttttttttttttttt

SEQ ID NO: 7206 - DNA, 84 bp, Artificial
  Barcode component
  misc_feature (33)..(34): n is a, c, g, or t
  misc_feature (43)..(44): n is a, c, g, or t
  misc_feature (53)..(54): n is a, c, g, or t
tttttttaagcagtggtatcaacgcagagtacnnttagaggcnnctgaacagnntttttttttttttttttttttttttttttt

SEQ ID NO: 7207 - DNA, 84 bp, Artificial
  Barcode component
  misc_feature (33)..(34): n is a, c, g, or t
  misc_feature (43)..(44): n is a, c, g, or t
  misc_feature (53)..(54): n is a, c, g, or t
tttttttaagcagtggtatcaacgcagagtacnnttagaggcnngtaggttcnntttttttttttttttttttttttttttttt

SEQ ID NO: 7208 - DNA, 84 bp, Artificial
  Barcode component
  misc_feature (33)..(34): n is a, c, g, or t
  misc_feature (43)..(44): n is a, c, g, or t
  misc_feature (53)..(54): n is a, c, g, or t
tttttttaagcagtggtatcaacgcagagtacnnttagaggcnngtatggacnntttttttttttttttttttttttttttttt

SEQ ID NO: 7209 - DNA, 84 bp, Artificial
  Barcode component
  misc_feature (33)..(34): n is a, c, g, or t
  misc_feature (43)..(44): n is a, c, g, or t
  misc_feature (53)..(54): n is a, c, g, or t
tttttttaagcagtggtatcaacgcagagtacnnttagaggcnntcgcaacanntttttttttttttttttttttttttttttt

SEQ ID NO: 7210 - DNA, 84 bp, Artificial
  Barcode component
  misc_feature (33)..(34): n is a, c, g, or t
  misc_feature (43)..(44): n is a, c, g, or t
  misc_feature (53)..(54): n is a, c, g, or t
tttttttaagcagtggtatcaacgcagagtacnnttagaggcnnccgctaatnntttttttttttttttttttttttttttttt

SEQ ID NO: 7211 - DNA, 84 bp, Artificial
  Barcode component
  misc_feature (33)..(34): n is a, c, g, or t
  misc_feature (43)..(44): n is a, c, g, or t
  misc_feature (53)..(54): n is a, c, g, or t
tttttttaagcagtggtatcaacgcagagtacnnttagaggcnngattcgcanntttttttttttttttttttttttttttttt

SEQ ID NO: 7212 - DNA, 84 bp, Artificial
  Barcode component
  misc_feature (33)..(34): n is a, c, g, or t
  misc_feature (43)..(44): n is a, c, g, or t
  misc_feature (53)..(54): n is a, c, g, or t
tttttttaagcagtggtatcaacgcagagtacnnttagaggcnncgatggaanntttttttttttttttttttttttttttttt

SEQ ID NO: 7213 - DNA, 84 bp, Artificial
  Barcode component
  misc_feature (33)..(34): n is a, c, g, or t
  misc_feature (43)..(44): n is a, c, g, or t
  misc_feature (53)..(54): n is a, c, g, or t
tttttttaagcagtggtatcaacgcagagtacnnttagaggcnnagcaagganntttttttttttttttttttttttttttttt

SEQ ID NO: 7214 - DNA, 84 bp, Artificial
  Barcode component
  misc_feature (33)..(34): n is a, c, g, or t
  misc_feature (43)..(44): n is a, c, g, or t
  misc_feature (53)..(54): n is a, c, g, or t
tttttttaagcagtggtatcaacgcagagtacnnttagaggcnncgtagcaanntttttttttttttttttttttttttttttt

SEQ ID NO: 7215 - DNA, 84 bp, Artificial
  Barcode component
  misc_feature (33)..(34): n is a, c, g, or t
  misc_feature (43)..(44): n is a, c, g, or t
  misc_feature (53)..(54): n is a, c, g, or t
tttttttaagcagtggtatcaacgcagagtacnnttagaggcnntggcagtanntttttttttttttttttttttttttttttt

SEQ ID NO: 7216 - DNA, 84 bp, Artificial
  Barcode component
  misc_feature (33)..(34): n is a, c, g, or t
  misc_feature (43)..(44): n is a, c, g, or t
  misc_feature (53)..(54): n is a, c, g, or t
tttttttaagcagtggtatcaacgcagagtacnnttagaggcnncggtagttnntttttttttttttttttttttttttttttt

SEQ ID NO: 7217 - DNA, 84 bp, Artificial
  Barcode component
  misc_feature (33)..(34): n is a, c, g, or t
  misc_feature (43)..(44): n is a, c, g, or t
  misc_feature (53)..(54): n is a, c, g, or t
tttttttaagcagtggtatcaacgcagagtacnnttagaggcnntgacttcgnntttttttttttttttttttttttttttttt

SEQ ID NO: 7218 - DNA, 84 bp, Artificial
  Barcode component
  misc_feature (33)..(34): n is a, c, g, or t
  misc_feature (43)..(44): n is a, c, g, or t
  misc_feature (53)..(54): n is a, c, g, or t
tttttttaagcagtggtatcaacgcagagtacnnttagaggcnngagtgcaanntttttttttttttttttttttttttttttt

SEQ ID NO: 7219 - DNA, 84 bp, Artificial
  Barcode component
  misc_feature (33)..(34): n is a, c, g, or t
  misc_feature (43)..(44): n is a, c, g, or t
  misc_feature (53)..(54): n is a, c, g, or t
tttttttaagcagtggtatcaacgcagagtacnnttagaggcnnacggtaacnntttttttttttttttttttttttttttttt

SEQ ID NO: 7220 - DNA, 84 bp, Artificial
  Barcode component
  misc_feature (33)..(34): n is a, c, g, or t
  misc_feature (43)..(44): n is a, c, g, or t
  misc_feature (53)..(54): n is a, c, g, or t
tttttttaagcagtggtatcaacgcagagtacnnttagaggcnnaagtggtgnntttttttttttttttttttttttttttttt

SEQ ID NO: 7221 - DNA, 84 bp, Artificial
  Barcode component
  misc_feature (33)..(34): n is a, c, g, or t
  misc_feature (43)..(44): n is a, c, g, or t
  misc_feature (53)..(54): n is a, c, g, or t
tttttttaagcagtggtatcaacgcagagtacnnttagaggcnnggagacaanntttttttttttttttttttttttttttttt

SEQ ID NO: 7222 - DNA, 84 bp, Artificial
  Barcode component
  misc_feature (33)..(34): n is a, c, g, or t
  misc_feature (43)..(44): n is a, c, g, or t
  misc_feature (53)..(54): n is a, c, g, or t
tttttttaagcagtggtatcaacgcagagtacnnttagaggcnntcaaggacnntttttttttttttttttttttttttttttt

SEQ ID NO: 7223 - DNA, 84 bp, Artificial
  Barcode component
  misc_feature (33)..(34): n is a, c, g, or t
  misc_feature (43)..(44): n is a, c, g, or t
  misc_feature (53)..(54): n is a, c, g, or t
tttttttaagcagtggtatcaacgcagagtacnnttagaggcnnaagagagcnntttttttttttttttttttttttttttttt

SEQ ID NO: 7224 - DNA, 84 bp, Artificial
  Barcode component
  misc_feature (33)..(34): n is a, c, g, or t
  misc_feature (43)..(44): n is a, c, g, or t
  misc_feature (53)..(54): n is a, c, g, or t
tttttttaagcagtggtatcaacgcagagtacnnttagaggcnncgagagatnntttttttttttttttttttttttttttttt

SEQ ID NO: 7225 - DNA, 84 bp, Artificial
  Barcode component
  misc_feature (33)..(34): n is a, c, g, or t
  misc_feature (43)..(44): n is a, c, g, or t
  misc_feature (53)..(54): n is a, c, g, or t
tttttttaagcagtggtatcaacgcagagtacnnttagaggcnnacagatggnntttttttttttttttttttttttttttttt

SEQ ID NO: 7226 - DNA, 84 bp, Artificial
  Barcode component
  misc_feature (33)..(34): n is a, c, g, or t
  misc_feature (43)..(44): n is a, c, g, or t
  misc_feature (53)..(54): n is a, c, g, or t
tttttttaagcagtggtatcaacgcagagtacnnttagaggcnnaggagtcanntttttttttttttttttttttttttttttt

SEQ ID NO: 7227 - DNA, 84 bp, Artificial
  Barcode component
  misc_feature (33)..(34): n is a, c, g, or t
  misc_feature (43)..(44): n is a, c, g, or t
  misc_feature (53)..(54): n is a, c, g, or t
tttttttaagcagtggtatcaacgcagagtacnnttagaggcnncgtgttacnntttttttttttttttttttttttttttttt

SEQ ID NO: 7228 - DNA, 84 bp, Artificial
  Barcode component
  misc_feature (33)..(34): n is a, c, g, or t
  misc_feature (43)..(44): n is a, c, g, or t
  misc_feature (53)..(54): n is a, c, g, or t
tttttttaagcagtggtatcaacgcagagtacnnttagaggcnntagtgtgcnntttttttttttttttttttttttttttttt

SEQ ID NO: 7229 - DNA, 84 bp, Artificial
  Barcode component
  misc_feature (33)..(34): n is a, c, g, or t
  misc_feature (43)..(44): n is a, c, g, or t
  misc_feature (53)..(54): n is a, c, g, or t
tttttttaagcagtggtatcaacgcagagtacnnttagaggcnnctcatgacnntttttttttttttttttttttttttttttt

SEQ ID NO: 7230 - DNA, 84 bp, Artificial
  Barcode component
  misc_feature (33)..(34): n is a, c, g, or t
  misc_feature (43)..(44): n is a, c, g, or t
  misc_feature (53)..(54): n is a, c, g, or t
tttttttaagcagtggtatcaacgcagagtacnnttagaggcnngtatccagnntttttttttttttttttttttttttttttt

SEQ ID NO: 7231 - DNA, 84 bp, Artificial
  Barcode component
  misc_feature (33)..(34): n is a, c, g, or t
  misc_feature (43)..(44): n is a, c, g, or t
  misc_feature (53)..(54): n is a, c, g, or t
tttttttaagcagtggtatcaacgcagagtacnnttagaggcnnacgcctatnntttttttttttttttttttttttttttttt

SEQ ID NO: 7232 - DNA, 84 bp, Artificial
  Barcode component
  misc_feature (33)..(34): n is a, c, g, or t
  misc_feature (43)..(44): n is a, c, g, or t
  misc_feature (53)..(54): n is a, c, g, or t
tttttttaagcagtggtatcaacgcagagtacnnttagaggcnnaacgacctnntttttttttttttttttttttttttttttt

SEQ ID NO: 7233 - DNA, 84 bp, Artificial
  Barcode component
  misc_feature (33)..(34): n is a, c, g, or t
  misc_feature (43)..(44): n is a, c, g, or t
  misc_feature (53)..(54): n is a, c, g, or t
tttttttaagcagtggtatcaacgcagagtacnnttagaggcnnatcaggctnntttttttttttttttttttttttttttttt

SEQ ID NO: 7234 - DNA, 84 bp, Artificial
  Barcode component
  misc_feature (33)..(34): n is a, c, g, or t
  misc_feature (43)..(44): n is a, c, g, or t
  misc_feature (53)..(54): n is a, c, g, or t
tttttttaagcagtggtatcaacgcagagtacnnttagaggcnncaagttcgnntttttttttttttttttttttttttttttt

SEQ ID NO: 7235 - DNA, 84 bp, Artificial
  Barcode component
  misc_feature (33)..(34): n is a, c, g, or t
  misc_feature (43)..(44): n is a, c, g, or t
  misc_feature (53)..(54): n is a, c, g, or t
tttttttaagcagtggtatcaacgcagagtacnnttagaggcnntagccaganntttttttttttttttttttttttttttttt

SEQ ID NO: 7236 - DNA, 84 bp, Artificial
  Barcode component
  misc_feature (33)..(34): n is a, c, g, or t
  misc_feature (43)..(44): n is a, c, g, or t
  misc_feature (53)..(54): n is a, c, g, or t
tttttttaagcagtggtatcaacgcagagtacnnttagaggcnncaatcacgnntttttttttttttttttttttttttttttt

SEQ ID NO: 7237 - DNA, 84 bp, Artificial
  Barcode component
  misc_feature (33)..(34): n is a, c, g, or t
  misc_feature (43)..(44): n is a, c, g, or t
  misc_feature (53)..(54): n is a, c, g, or t
tttttttaagcagtggtatcaacgcagagtacnnttagaggcnngcaacaagnntttttttttttttttttttttttttttttt

SEQ ID NO: 7238 - DNA, 84 bp, Artificial
  Barcode component
  misc_feature (33)..(34): n is a, c, g, or t
  misc_feature (43)..(44): n is a, c, g, or t
  misc_feature (53)..(54): n is a, c, g, or t
tttttttaagcagtggtatcaacgcagagtacnnttagaggcnncacgacaanntttttttttttttttttttttttttttttt

SEQ ID NO: 7239 - DNA, 84 bp, Artificial
  Barcode component
  misc_feature (33)..(34): n is a, c, g, or t
  misc_feature (43)..(44): n is a, c, g, or t
  misc_feature (53)..(54): n is a, c, g, or t
tttttttaagcagtggtatcaacgcagagtacnnttagaggcnntacggaganntttttttttttttttttttttttttttttt

SEQ ID NO: 7240 - DNA, 84 bp, Artificial
  Barcode component
  misc_feature (33)..(34): n is a, c, g, or t
  misc_feature (43)..(44): n is a, c, g, or t
  misc_feature (53)..(54): n is a, c, g, or t
tttttttaagcagtggtatcaacgcagagtacnnttagaggcnncgacaaganntttttttttttttttttttttttttttttt

SEQ ID NO: 7241 - DNA, 84 bp, Artificial
  Barcode component
  misc_feature (33)..(34): n is a, c, g, or t
  misc_feature (43)..(44): n is a, c, g, or t
  misc_feature (53)..(54): n is a, c, g, or t
tttttttaagcagtggtatcaacgcagagtacnnttagaggcnncgaagtganntttttttttttttttttttttttttttttt

SEQ ID NO: 7242 - DNA, 84 bp, Artificial
  Barcode component
  misc_feature (33)..(34): n is a, c, g, or t
  misc_feature (43)..(44): n is a, c, g, or t
  misc_feature (53)..(54): n is a, c, g, or t
tttttttaagcagtggtatcaacgcagagtacnnttagaggcnnagctggtanntttttttttttttttttttttttttttttt

SEQ ID NO: 7243 - DNA, 84 bp, Artificial
  Barcode component
  misc_feature (33)..(34): n is a, c, g, or t
  misc_feature (43)..(44): n is a, c, g, or t
  misc_feature (53)..(54): n is a, c, g, or t
tttttttaagcagtggtatcaacgcagagtacnnttagaggcnnaactaggcnntttttttttttttttttttttttttttttt

SEQ ID NO: 7244 - DNA, 84 bp, Artificial
  Barcode component
  misc_feature (33)..(34): n is a, c, g, or t
  misc_feature (43)..(44): n is a, c, g, or t
  misc_feature (53)..(54): n is a, c, g, or t
tttttttaagcagtggtatcaacgcagagtacnnttagaggcnncagcaagtnntttttttttttttttttttttttttttttt

SEQ ID NO: 7245 - DNA, 84 bp, Artificial
  Barcode component
  misc_feature (33)..(34): n is a, c, g, or t
  misc_feature (43)..(44): n is a, c, g, or t
  misc_feature (53)..(54): n is a, c, g, or t
tttttttaagcagtggtatcaacgcagagtacnnttagaggcnnacgaggtanntttttttttttttttttttttttttttttt

SEQ ID NO: 7246 - DNA, 84 bp, Artificial
  Barcode component
  misc_feature (33)..(34): n is a, c, g, or t
  misc_feature (43)..(44): n is a, c, g, or t
  misc_feature (53)..(54): n is a, c, g, or t
tttttttaagcagtggtatcaacgcagagtacnnttagaggcnncatcttccnntttttttttttttttttttttttttttttt

SEQ ID NO: 7247 - DNA, 84 bp, Artificial
  Barcode component
  misc_feature (33)..(34): n is a, c, g, or t
  misc_feature (43)..(44): n is a, c, g, or t
  misc_feature (53)..(54): n is a, c, g, or t
tttttttaagcagtggtatcaacgcagagtacnnttagaggcnncctgaatcnntttttttttttttttttttttttttttttt

SEQ ID NO: 7248 - DNA, 84 bp, Artificial
  Barcode component
  misc_feature (33)..(34): n is a, c, g, or t
  misc_feature (43)..(44): n is a, c, g, or t
  misc_feature (53)..(54): n is a, c, g, or t
tttttttaagcagtggtatcaacgcagagtacnnttagaggcnntgcagactnntttttttttttttttttttttttttttttt

SEQ ID NO: 7249 - DNA, 84 bp, Artificial
  Barcode component
  misc_feature (33)..(34): n is a, c, g, or t
  misc_feature (43)..(44): n is a, c, g, or t
  misc_feature (53)..(54): n is a, c, g, or t
tttttttaagcagtggtatcaacgcagagtacnnttagaggcnnagatgtggnntttttttttttttttttttttttttttttt

SEQ ID NO: 7250 - DNA, 84 bp, Artificial
  Barcode component
  misc_feature (33)..(34): n is a, c, g, or t
  misc_feature (43)..(44): n is a, c, g, or t
  misc_feature (53)..(54): n is a, c, g, or t
tttttttaagcagtggtatcaacgcagagtacnnttagaggcnnagttcgacnntttttttttttttttttttttttttttttt

SEQ ID NO: 7251 - DNA, 84 bp, Artificial
  Barcode component
  misc_feature (33)..(34): n is a, c, g, or t
  misc_feature (43)..(44): n is a, c, g, or t
  misc_feature (53)..(54): n is a, c, g, or t
tttttttaagcagtggtatcaacgcagagtacnnttagaggcnnacaacctcnntttttttttttttttttttttttttttttt

SEQ ID NO: 7252 - DNA, 84 bp, Artificial
  Barcode component
  misc_feature (33)..(34): n is a, c, g, or t
  misc_feature (43)..(44): n is a, c, g, or t
  misc_feature (53)..(54): n is a, c, g, or t
tttttttaagcagtggtatcaacgcagagtacnnttagaggcnncatggtagnntttttttttttttttttttttttttttttt

SEQ ID NO: 7253 - DNA, 84 bp, Artificial
  Barcode component
  misc_feature (33)..(34): n is a, c, g, or t
  misc_feature (43)..(44): n is a, c, g, or t
  misc_feature (53)..(54): n is a, c, g, or t
tttttttaagcagtggtatcaacgcagagtacnnttagaggcnncgtatctcnntttttttttttttttttttttttttttttt

SEQ ID NO: 7254 - DNA, 84 bp, Artificial
  Barcode component
  misc_feature (33)..(34): n is a, c, g, or t
  misc_feature (43)..(44): n is a, c, g, or t
  misc_feature (53)..(54): n is a, c, g, or t
tttttttaagcagtggtatcaacgcagagtacnnttagaggcnncctagttcnntttttttttttttttttttttttttttttt

SEQ ID NO: 7255 - DNA, 84 bp, Artificial
  Barcode component
  misc_feature (33)..(34): n is a, c, g, or t
  misc_feature (43)..(44): n is a, c, g, or t
  misc_feature (53)..(54): n is a, c, g, or t
tttttttaagcagtggtatcaacgcagagtacnnttagaggcnncaagagtcnntttttttttttttttttttttttttttttt

SEQ ID NO: 7256 - DNA, 84 bp, Artificial
  Barcode component
  misc_feature (33)..(34): n is a, c, g, or t
  misc_feature (43)..(44): n is a, c, g, or t
  misc_feature (53)..(54): n is a, c, g, or t
tttttttaagcagtggtatcaacgcagagtacnnccattgtgnnaatcggcanntttttttttttttttttttttttttttttt

SEQ ID NO: 7257 - DNA, 84 bp, Artificial
  Barcode component
  misc_feature (33)..(34): n is a, c, g, or t
  misc_feature (43)..(44): n is a, c, g, or t
  misc_feature (53)..(54): n is a, c, g, or t
tttttttaagcagtggtatcaacgcagagtacnnccattgtgnntacggcatnntttttttttttttttttttttttttttttt

SEQ ID NO: 7258 - DNA, 84 bp, Artificial
  Barcode component
  misc_feature (33)..(34): n is a, c, g, or t
  misc_feature (43)..(44): n is a, c, g, or t
  misc_feature (53)..(54): n is a, c, g, or t
tttttttaagcagtggtatcaacgcagagtacnnccattgtgnnttggatcgnntttttttttttttttttttttttttttttt

SEQ ID NO: 7259 - DNA, 84 bp, Artificial
  Barcode component
  misc_feature (33)..(34): n is a, c, g, or t
  misc_feature (43)..(44): n is a, c, g, or t
  misc_feature (53)..(54): n is a, c, g, or t
tttttttaagcagtggtatcaacgcagagtacnnccattgtgnntggaacganntttttttttttttttttttttttttttttt

SEQ ID NO: 7260 - DNA, 84 bp, Artificial
  Barcode component
  misc_feature (33)..(34): n is a, c, g, or t
  misc_feature (43)..(44): n is a, c, g, or t
  misc_feature (53)..(54): n is a, c, g, or t
tttttttaagcagtggtatcaacgcagagtacnnccattgtgnnggcaatcanntttttttttttttttttttttttttttttt

SEQ ID NO: 7261 - DNA, 84 bp, Artificial
  Barcode component
  misc_feature (33)..(34): n is a, c, g, or t
  misc_feature (43)..(44): n is a, c, g, or t
  misc_feature (53)..(54): n is a, c, g, or t
tttttttaagcagtggtatcaacgcagagtacnnccattgtgnngaatccganntttttttttttttttttttttttttttttt

SEQ ID NO: 7262 - DNA, 84 bp, Artificial
  Barcode component
  misc_feature (33)..(34): n is a, c, g, or t
  misc_feature (43)..(44): n is a, c, g, or t
  misc_feature (53)..(54): n is a, c, g, or t
tttttttaagcagtggtatcaacgcagagtacnnccattgtgnnttacggtgnntttttttttttttttttttttttttttttt

SEQ ID NO: 7263 - DNA, 84 bp, Artificial
  Barcode component
  misc_feature (33)..(34): n is a, c, g, or t
  misc_feature (43)..(44): n is a, c, g, or t
  misc_feature (53)..(54): n is a, c, g, or t
tttttttaagcagtggtatcaacgcagagtacnnccattgtgnncatatcggnntttttttttttttttttttttttttttttt

SEQ ID NO: 7264 - DNA, 84 bp, Artificial
  Barcode component
  misc_feature (33)..(34): n is a, c, g, or t
  misc_feature (43)..(44): n is a, c, g, or t
  misc_feature (53)..(54): n is a, c, g, or t
tttttttaagcagtggtatcaacgcagagtacnnccattgtgnncttcggtanntttttttttttttttttttttttttttttt

SEQ ID NO: 7265 - DNA, 84 bp, Artificial
  Barcode component
  misc_feature (33)..(34): n is a, c, g, or t
  misc_feature (43)..(44): n is a, c, g, or t
  misc_feature (53)..(54): n is a, c, g, or t
tttttttaagcagtggtatcaacgcagagtacnnccattgtgnntcctaacgnntttttttttttttttttttttttttttttt

SEQ ID NO: 7266 - DNA, 84 bp, Artificial
  Barcode component
  misc_feature (33)..(34): n is a, c, g, or t
  misc_feature (43)..(44): n is a, c, g, or t
  misc_feature (53)..(54): n is a, c, g, or t
tttttttaagcagtggtatcaacgcagagtacnnccattgtgnngtaagccanntttttttttttttttttttttttttttttt

SEQ ID NO: 7267 - DNA, 84 bp, Artificial
  Barcode component
  misc_feature (33)..(34): n is a, c, g, or t
  misc_feature (43)..(44): n is a, c, g, or t
  misc_feature (53)..(54): n is a, c, g, or t
tttttttaagcagtggtatcaacgcagagtacnnccattgtgnntaaggtggnntttttttttttttttttttttttttttttt

SEQ ID NO: 7268 - DNA, 84 bp, Artificial
  Barcode component
  misc_feature (33)..(34): n is a, c, g, or t
  misc_feature (43)..(44): n is a, c, g, or t
  misc_feature (53)..(54): n is a, c, g, or t
tttttttaagcagtggtatcaacgcagagtacnnccattgtgnnggtaagctnntttttttttttttttttttttttttttttt

SEQ ID NO: 7269 - DNA, 84 bp, Artificial
  Barcode component
  misc_feature (33)..(34): n is a, c, g, or t
  misc_feature (43)..(44): n is a, c, g, or t
  misc_feature (53)..(54): n is a, c, g, or t
tttttttaagcagtggtatcaacgcagagtacnnccattgtgnntgtgtcganntttttttttttttttttttttttttttttt

SEQ ID NO: 7270 - DNA, 84 bp, Artificial
  Barcode component
  misc_feature (33)..(34): n is a, c, g, or t
  misc_feature (43)..(44): n is a, c, g, or t
  misc_feature (53)..(54): n is a, c, g, or t
tttttttaagcagtggtatcaacgcagagtacnnccattgtgnngagcatganntttttttttttttttttttttttttttttt

SEQ ID NO: 7271 - DNA, 84 bp, Artificial
  Barcode component
  misc_feature (33)..(34): n is a, c, g, or t
  misc_feature (43)..(44): n is a, c, g, or t
  misc_feature (53)..(54): n is a, c, g, or t
tttttttaagcagtggtatcaacgcagagtacnnccattgtgnntcgaagtcnntttttttttttttttttttttttttttttt

SEQ ID NO: 7272 - DNA, 84 bp, Artificial
  Barcode component
  misc_feature (33)..(34): n is a, c, g, or t
  misc_feature (43)..(44): n is a, c, g, or t
  misc_feature (53)..(54): n is a, c, g, or t
tttttttaagcagtggtatcaacgcagagtacnnccattgtgnnggtgaacanntttttttttttttttttttttttttttttt

SEQ ID NO: 7273 - DNA, 84 bp, Artificial
  Barcode component
  misc_feature (33)..(34): n is a, c, g, or t
  misc_feature (43)..(44): n is a, c, g, or t
  misc_feature (53)..(54): n is a, c, g, or t
tttttttaagcagtggtatcaacgcagagtacnnccattgtgnnacatgcacnntttttttttttttttttttttttttttttt

SEQ ID NO: 7274 - DNA, 84 bp, Artificial
  Barcode component
  misc_feature (33)..(34): n is a, c, g, or t
  misc_feature (43)..(44): n is a, c, g, or t
  misc_feature (53)..(54): n is a, c, g, or t
tttttttaagcagtggtatcaacgcagagtacnnccattgtgnnccaacagtnntttttttttttttttttttttttttttttt

SEQ ID NO: 7275 - DNA, 84 bp, Artificial
  Barcode component
  misc_feature (33)..(34): n is a, c, g, or t
  misc_feature (43)..(44): n is a, c, g, or t
  misc_feature (53)..(54): n is a, c, g, or t
tttttttaagcagtggtatcaacgcagagtacnnccattgtgnnagaacagcnntttttttttttttttttttttttttttttt

SEQ ID NO: 7276 - DNA, 84 bp, Artificial
  Barcode component
  misc_feature (33)..(34): n is a, c, g, or t
  misc_feature (43)..(44): n is a, c, g, or t
  misc_feature (53)..(54): n is a, c, g, or t
tttttttaagcagtggtatcaacgcagagtacnnccattgtgnngaacacgtnntttttttttttttttttttttttttttttt

SEQ ID NO: 7277 - DNA, 84 bp, Artificial
  Barcode component
  misc_feature (33)..(34): n is a, c, g, or t
  misc_feature (43)..(44): n is a, c, g, or t
  misc_feature (53)..(54): n is a, c, g, or t
tttttttaagcagtggtatcaacgcagagtacnnccattgtgnnggtcttcanntttttttttttttttttttttttttttttt

SEQ ID NO: 7278 - DNA, 84 bp, Artificial
  Barcode component
  misc_feature (33)..(34): n is a, c, g, or t
  misc_feature (43)..(44): n is a, c, g, or t
  misc_feature (53)..(54): n is a, c, g, or t
tttttttaagcagtggtatcaacgcagagtacnnccattgtgnnaggttcagnntttttttttttttttttttttttttttttt

SEQ ID NO: 7279 - DNA, 84 bp, Artificial
  Barcode component
  misc_feature (33)..(34): n is a, c, g, or t
  misc_feature (43)..(44): n is a, c, g, or t
  misc_feature (53)..(54): n is a, c, g, or t
tttttttaagcagtggtatcaacgcagagtacnnccattgtgnnctagagcanntttttttttttttttttttttttttttttt

SEQ ID NO: 7280 - DNA, 84 bp, Artificial
  Barcode component
  misc_feature (33)..(34): n is a, c, g, or t
  misc_feature (43)..(44): n is a, c, g, or t
  misc_feature (53)..(54): n is a, c, g, or t
tttttttaagcagtggtatcaacgcagagtacnnccattgtgnncttctagcnntttttttttttttttttttttttttttttt

SEQ ID NO: 7281 - DNA, 84 bp, Artificial
  Barcode component
  misc_feature (33)..(34): n is a, c, g, or t
  misc_feature (43)..(44): n is a, c, g, or t
  misc_feature (53)..(54): n is a, c, g, or t
tttttttaagcagtggtatcaacgcagagtacnnccattgtgnngagtaacgnntttttttttttttttttttttttttttttt

SEQ ID NO: 7282 - DNA, 84 bp, Artificial
  Barcode component
  misc_feature (33)..(34): n is a, c, g, or t
  misc_feature (43)..(44): n is a, c, g, or t
  misc_feature (53)..(54): n is a, c, g, or t
tttttttaagcagtggtatcaacgcagagtacnnccattgtgnnctaagaggnntttttttttttttttttttttttttttttt

SEQ ID NO: 7283 - DNA, 84 bp, Artificial
  Barcode component
  misc_feature (33)..(34): n is a, c, g, or t
  misc_feature (43)..(44): n is a, c, g, or t
  misc_feature (53)..(54): n is a, c, g, or t
tttttttaagcagtggtatcaacgcagagtacnnccattgtgnnacgtgtagnntttttttttttttttttttttttttttttt

SEQ ID NO: 7284 - DNA, 84 bp, Artificial
  Barcode component
  misc_feature (33)..(34): n is a, c, g, or t
  misc_feature (43)..(44): n is a, c, g, or t
  misc_feature (53)..(54): n is a, c, g, or t
tttttttaagcagtggtatcaacgcagagtacnnccattgtgnnactacaggnntttttttttttttttttttttttttttttt

SEQ ID NO: 7285 - DNA, 84 bp, Artificial
  Barcode component
  misc_feature (33)..(34): n is a, c, g, or t
  misc_feature (43)..(44): n is a, c, g, or t
  misc_feature (53)..(54): n is a, c, g, or t
tttttttaagcagtggtatcaacgcagagtacnnccattgtgnntacaggtcnntttttttttttttttttttttttttttttt

SEQ ID NO: 7286 - DNA, 84 bp, Artificial
  Barcode component
  misc_feature (33)..(34): n is a, c, g, or t
  misc_feature (43)..(44): n is a, c, g, or t
  misc_feature (53)..(54): n is a, c, g, or t
tttttttaagcagtggtatcaacgcagagtacnnccattgtgnnctcacatgnntttttttttttttttttttttttttttttt

SEQ ID NO: 7287 - DNA, 84 bp, Artificial
  Barcode component
  misc_feature (33)..(34): n is a, c, g, or t
  misc_feature (43)..(44): n is a, c, g, or t
  misc_feature (53)..(54): n is a, c, g, or t
tttttttaagcagtggtatcaacgcagagtacnnccattgtgnnactaggagnntttttttttttttttttttttttttttttt

SEQ ID NO: 7288 - DNA, 84 bp, Artificial
  Barcode component
  misc_feature (33)..(34): n is a, c, g, or t
  misc_feature (43)..(44): n is a, c, g, or t
  misc_feature (53)..(54): n is a, c, g, or t
tttttttaagcagtggtatcaacgcagagtacnnccattgtgnnccatagganntttttttttttttttttttttttttttttt

SEQ ID NO: 7289 - DNA, 84 bp, Artificial
  Barcode component
  misc_feature (33)..(34): n is a, c, g, or t
  misc_feature (43)..(44): n is a, c, g, or t
  misc_feature (53)..(54): n is a, c, g, or t
tttttttaagcagtggtatcaacgcagagtacnnccattgtgnnggagaatcnntttttttttttttttttttttttttttttt

SEQ ID NO: 7290 - DNA, 84 bp, Artificial
  Barcode component
  misc_feature (33)..(34): n is a, c, g, or t
  misc_feature (43)..(44): n is a, c, g, or t
  misc_feature (53)..(54): n is a, c, g, or t
tttttttaagcagtggtatcaacgcagagtacnnccattgtgnngccaagaanntttttttttttttttttttttttttttttt

SEQ ID NO: 7291 - DNA, 84 bp, Artificial
  Barcode component
  misc_feature (33)..(34): n is a, c, g, or t
  misc_feature (43)..(44): n is a, c, g, or t
  misc_feature (53)..(54): n is a, c, g, or t
tttttttaagcagtggtatcaacgcagagtacnnccattgtgnnaaggcaagnntttttttttttttttttttttttttttttt

SEQ ID NO: 7292 - DNA, 84 bp, Artificial
  Barcode component
  misc_feature (33)..(34): n is a, c, g, or t
  misc_feature (43)..(44): n is a, c, g, or t
  misc_feature (53)..(54): n is a, c, g, or t
tttttttaagcagtggtatcaacgcagagtacnnccattgtgnnaatgtcgcnntttttttttttttttttttttttttttttt

SEQ ID NO: 7293 - DNA, 84 bp, Artificial
  Barcode component
  misc_feature (33)..(34): n is a, c, g, or t
  misc_feature (43)..(44): n is a, c, g, or t
  misc_feature (53)..(54): n is a, c, g, or t
tttttttaagcagtggtatcaacgcagagtacnnccattgtgnnatggaaccnntttttttttttttttttttttttttttttt

SEQ ID NO: 7294 - DNA, 84 bp, Artificial
  Barcode component
  misc_feature (33)..(34): n is a, c, g, or t
  misc_feature (43)..(44): n is a, c, g, or t
  misc_feature (53)..(54): n is a, c, g, or t
tttttttaagcagtggtatcaacgcagagtacnnccattgtgnnagaggcatnntttttttttttttttttttttttttttttt

SEQ ID NO: 7295 - DNA, 84 bp, Artificial
  Barcode component
  misc_feature (33)..(34): n is a, c, g, or t
  misc_feature (43)..(44): n is a, c, g, or t
  misc_feature (53)..(54): n is a, c, g, or t
tttttttaagcagtggtatcaacgcagagtacnnccattgtgnntgcatagcnntttttttttttttttttttttttttttttt

SEQ ID NO: 7296 - DNA, 84 bp, Artificial
  Barcode component
  misc_feature (33)..(34): n is a, c, g, or t
  misc_feature (43)..(44): n is a, c, g, or t
  misc_feature (53)..(54): n is a, c, g, or t
tttttttaagcagtggtatcaacgcagagtacnnccattgtgnnctaacgganntttttttttttttttttttttttttttttt

SEQ ID NO: 7297 - DNA, 84 bp, Artificial
  Barcode component
  misc_feature (33)..(34): n is a, c, g, or t
  misc_feature (43)..(44): n is a, c, g, or t
  misc_feature (53)..(54): n is a, c, g, or t
tttttttaagcagtggtatcaacgcagagtacnnccattgtgnntatcgaggnntttttttttttttttttttttttttttttt

SEQ ID NO: 7298 - DNA, 84 bp, Artificial
  Barcode component
  misc_feature (33)..(34): n is a, c, g, or t
  misc_feature (43)..(44): n is a, c, g, or t
  misc_feature (53)..(54): n is a, c, g, or t
tttttttaagcagtggtatcaacgcagagtacnnccattgtgnncatagcctnntttttttttttttttttttttttttttttt

SEQ ID NO: 7299 - DNA, 84 bp, Artificial
  Barcode component
  misc_feature (33)..(34): n is a, c, g, or t
  misc_feature (43)..(44): n is a, c, g, or t
  misc_feature (53)..(54): n is a, c, g, or t
tttttttaagcagtggtatcaacgcagagtacnnccattgtgnnatcgagacnntttttttttttttttttttttttttttttt

SEQ ID NO: 7300 - DNA, 84 bp, Artificial
  Barcode component
  misc_feature (33)..(34): n is a, c, g, or t
  misc_feature (43)..(44): n is a, c, g, or t
  misc_feature (53)..(54): n is a, c, g, or t
tttttttaagcagtggtatcaacgcagagtacnnccattgtgnnggaagagtnntttttttttttttttttttttttttttttt

SEQ ID NO: 7301 - DNA, 84 bp, Artificial
  Barcode component
  misc_feature (33)..(34): n is a, c, g, or t
  misc_feature (43)..(44): n is a, c, g, or t
  misc_feature (53)..(54): n is a, c, g, or t
tttttttaagcagtggtatcaacgcagagtacnnccattgtgnnccaagtagnntttttttttttttttttttttttttttttt

SEQ ID NO: 7302 - DNA, 84 bp, Artificial
  Barcode component
  misc_feature (33)..(34): n is a, c, g, or t
  misc_feature (43)..(44): n is a, c, g, or t
  misc_feature (53)..(54): n is a, c, g, or t
tttttttaagcagtggtatcaacgcagagtacnnccattgtgnnctgaacagnntttttttttttttttttttttttttttttt

SEQ ID NO: 7303 - DNA, 84 bp, Artificial
  Barcode component
  misc_feature (33)..(34): n is a, c, g, or t
  misc_feature (43)..(44): n is a, c, g, or t
  misc_feature (53)..(54): n is a, c, g, or t
tttttttaagcagtggtatcaacgcagagtacnnccattgtgnngtaggttcnntttttttttttttttttttttttttttttt

SEQ ID NO: 7304 - DNA, 84 bp, Artificial
  Barcode component
  misc_feature (33)..(34): n is a, c, g, or t
  misc_feature (43)..(44): n is a, c, g, or t
  misc_feature (53)..(54): n is a, c, g, or t
tttttttaagcagtggtatcaacgcagagtacnnccattgtgnngtatggacnntttttttttttttttttttttttttttttt

SEQ ID NO: 7305 - DNA, 84 bp, Artificial
  Barcode component
  misc_feature (33)..(34): n is a, c, g, or t
  misc_feature (43)..(44): n is a, c, g, or t
  misc_feature (53)..(54): n is a, c, g, or t
tttttttaagcagtggtatcaacgcagagtacnnccattgtgnntcgcaacanntttttttttttttttttttttttttttttt

SEQ ID NO: 7306 - DNA, 84 bp, Artificial
  Barcode component
  misc_feature (33)..(34): n is a, c, g, or t
  misc_feature (43)..(44): n is a, c, g, or t
  misc_feature (53)..(54): n is a, c, g, or t
tttttttaagcagtggtatcaacgcagagtacnnccattgtgnnccgctaatnntttttttttttttttttttttttttttttt

SEQ ID NO: 7307 - DNA, 84 bp, Artificial
  Barcode component
  misc_feature (33)..(34): n is a, c, g, or t
  misc_feature (43)..(44): n is a, c, g, or t
  misc_feature (53)..(54): n is a, c, g, or t
tttttttaagcagtggtatcaacgcagagtacnnccattgtgnngattcgcanntttttttttttttttttttttttttttttt

SEQ ID NO: 7308 - DNA, 84 bp, Artificial
  Barcode component
  misc_feature (33)..(34): n is a, c, g, or t
  misc_feature (43)..(44): n is a, c, g, or t
  misc_feature (53)..(54): n is a, c, g, or t
tttttttaagcagtggtatcaacgcagagtacnnccattgtgnncgatggaanntttttttttttttttttttttttttttttt

SEQ ID NO: 7309 - DNA, 84 bp, Artificial
  Barcode component
  misc_feature (33)..(34): n is a, c, g, or t
  misc_feature (43)..(44): n is a, c, g, or t
  misc_feature (53)..(54): n is a, c, g, or t
tttttttaagcagtggtatcaacgcagagtacnnccattgtgnnagcaagganntttttttttttttttttttttttttttttt

SEQ ID NO: 7310 - DNA, 84 bp, Artificial
  Barcode component
  misc_feature (33)..(34): n is a, c, g, or t
  misc_feature (43)..(44): n is a, c, g, or t
  misc_feature (53)..(54): n is a, c, g, or t
tttttttaagcagtggtatcaacgcagagtacnnccattgtgnncgtagcaanntttttttttttttttttttttttttttttt

SEQ ID NO: 7311 - DNA, 84 bp, Artificial
  Barcode component
  misc_feature (33)..(34): n is a, c, g, or t
  misc_feature (43)..(44): n is a, c, g, or t
  misc_feature (53)..(54): n is a, c, g, or t
tttttttaagcagtggtatcaacgcagagtacnnccattgtgnntggcagtanntttttttttttttttttttttttttttttt

SEQ ID NO: 7312 - DNA, 84 bp, Artificial
  Barcode component
  misc_feature (33)..(34): n is a, c, g, or t
  misc_feature (43)..(44): n is a, c, g, or t
  misc_feature (53)..(54): n is a, c, g, or t
tttttttaagcagtggtatcaacgcagagtacnnccattgtgnncggtagttnntttttttttttttttttttttttttttttt

SEQ ID NO: 7313 - DNA, 84 bp, Artificial
  Barcode component
  misc_feature (33)..(34): n is a, c, g, or t
  misc_feature (43)..(44): n is a, c, g, or t
  misc_feature (53)..(54): n is a, c, g, or t
tttttttaagcagtggtatcaacgcagagtacnnccattgtgnntgacttcgnntttttttttttttttttttttttttttttt

SEQ ID NO: 7314 - DNA, 84 bp, Artificial
  Barcode component
  misc_feature (33)..(34): n is a, c, g, or t
  misc_feature (43)..(44): n is a, c, g, or t
  misc_feature (53)..(54): n is a, c, g, or t
tttttttaagcagtggtatcaacgcagagtacnnccattgtgnngagtgcaanntttttttttttttttttttttttttttttt

SEQ ID NO: 7315 - DNA, 84 bp, Artificial
  Barcode component
  misc_feature (33)..(34): n is a, c, g, or t
  misc_feature (43)..(44): n is a, c, g, or t
  misc_feature (53)..(54): n is a, c, g, or t
tttttttaagcagtggtatcaacgcagagtacnnccattgtgnnacggtaacnntttttttttttttttttttttttttttttt

SEQ ID NO: 7316 - DNA, 84 bp, Artificial
  Barcode component
  misc_feature (33)..(34): n is a, c, g, or t
  misc_feature (43)..(44): n is a, c, g, or t
  misc_feature (53)..(54): n is a, c, g, or t
tttttttaagcagtggtatcaacgcagagtacnnccattgtgnnaagtggtgnntttttttttttttttttttttttttttttt

SEQ ID NO: 7317 - DNA, 84 bp, Artificial
  Barcode component
  misc_feature (33)..(34): n is a, c, g, or t
  misc_feature (43)..(44): n is a, c, g, or t
  misc_feature (53)..(54): n is a, c, g, or t
tttttttaagcagtggtatcaacgcagagtacnnccattgtgnnggagacaanntttttttttttttttttttttttttttttt

SEQ ID NO: 7318 - DNA, 84 bp, Artificial
  Barcode component
  misc_feature (33)..(34): n is a, c, g, or t
  misc_feature (43)..(44): n is a, c, g, or t
  misc_feature (53)..(54): n is a, c, g, or t
tttttttaagcagtggtatcaacgcagagtacnnccattgtgnntcaaggacnntttttttttttttttttttttttttttttt

SEQ ID NO: 7319 - DNA, 84 bp, Artificial
  Barcode component
  misc_feature (33)..(34): n is a, c, g, or t
  misc_feature (43)..(44): n is a, c, g, or t
  misc_feature (53)..(54): n is a, c, g, or t
tttttttaagcagtggtatcaacgcagagtacnnccattgtgnnaagagagcnntttttttttttttttttttttttttttttt

SEQ ID NO: 7320 - DNA, 84 bp, Artificial
  Barcode component
  misc_feature (33)..(34): n is a, c, g, or t
  misc_feature (43)..(44): n is a, c, g, or t
  misc_feature (53)..(54): n is a, c, g, or t
tttttttaagcagtggtatcaacgcagagtacnnccattgtgnncgagagatnntttttttttttttttttttttttttttttt

SEQ ID NO: 7321 - DNA, 84 bp, Artificial
  Barcode component
  misc_feature (33)..(34): n is a, c, g, or t
  misc_feature (43)..(44): n is a, c, g, or t
  misc_feature (53)..(54): n is a, c, g, or t
tttttttaagcagtggtatcaacgcagagtacnnccattgtgnnacagatggnntttttttttttttttttttttttttttttt

SEQ ID NO: 7322 - DNA, 84 bp, Artificial
  Barcode component
  misc_feature (33)..(34): n is a, c, g, or t
  misc_feature (43)..(44): n is a, c, g, or t
  misc_feature (53)..(54): n is a, c, g, or t
tttttttaagcagtggtatcaacgcagagtacnnccattgtgnnaggagtcanntttttttttttttttttttttttttttttt

SEQ ID NO: 7323 - DNA, 84 bp, Artificial
  Barcode component
  misc_feature (33)..(34): n is a, c, g, or t
  misc_feature (43)..(44): n is a, c, g, or t
  misc_feature (53)..(54): n is a, c, g, or t
tttttttaagcagtggtatcaacgcagagtacnnccattgtgnncgtgttacnntttttttttttttttttttttttttttttt

SEQ ID NO: 7324 - DNA, 84 bp, Artificial
  Barcode component
  misc_feature (33)..(34): n is a, c, g, or t
  misc_feature (43)..(44): n is a, c, g, or t
  misc_feature (53)..(54): n is a, c, g, or t
tttttttaagcagtggtatcaacgcagagtacnnccattgtgnntagtgtgcnntttttttttttttttttttttttttttttt

SEQ ID NO: 7325 - DNA, 84 bp, Artificial
  Barcode component
  misc_feature (33)..(34): n is a, c, g, or t
  misc_feature (43)..(44): n is a, c, g, or t
  misc_feature (53)..(54): n is a, c, g, or t
tttttttaagcagtggtatcaacgcagagtacnnccattgtgnnctcatgacnntttttttttttttttttttttttttttttt

SEQ ID NO: 7326 - DNA, 84 bp, Artificial
  Barcode component
  misc_feature (33)..(34): n is a, c, g, or t
  misc_feature (43)..(44): n is a, c, g, or t
  misc_feature (53)..(54): n is a, c, g, or t
tttttttaagcagtggtatcaacgcagagtacnnccattgtgnngtatccagnntttttttttttttttttttttttttttttt

SEQ ID NO: 7327 - DNA, 84 bp, Artificial
  Barcode component
  misc_feature (33)..(34): n is a, c, g, or t
  misc_feature (43)..(44): n is a, c, g, or t
  misc_feature (53)..(54): n is a, c, g, or t
tttttttaagcagtggtatcaacgcagagtacnnccattgtgnnacgcctatnntttttttttttttttttttttttttttttt

SEQ ID NO: 7328 - DNA, 84 bp, Artificial
  Barcode component
  misc_feature (33)..(34): n is a, c, g, or t
  misc_feature (43)..(44): n is a, c, g, or t
  misc_feature (53)..(54): n is a, c, g, or t
tttttttaagcagtggtatcaacgcagagtacnnccattgtgnnaacgacctnntttttttttttttttttttttttttttttt

SEQ ID NO: 7329 - DNA, 84 bp, Artificial
  Barcode component
  misc_feature (33)..(34): n is a, c, g, or t
  misc_feature (43)..(44): n is a, c, g, or t
  misc_feature (53)..(54): n is a, c, g, or t
tttttttaagcagtggtatcaacgcagagtacnnccattgtgnnatcaggctnntttttttttttttttttttttttttttttt

SEQ ID NO: 7330 - DNA, 84 bp, Artificial
  Barcode component
  misc_feature (33)..(34): n is a, c, g, or t
  misc_feature (43)..(44): n is a, c, g, or t
  misc_feature (53)..(54): n is a, c, g, or t
tttttttaagcagtggtatcaacgcagagtacnnccattgtgnncaagttcgnntttttttttttttttttttttttttttttt

SEQ ID NO: 7331 - DNA, 84 bp, Artificial
  Barcode component
  misc_feature (33)..(34): n is a, c, g, or t
  misc_feature (43)..(44): n is a, c, g, or t
  misc_feature (53)..(54): n is a, c, g, or t
tttttttaagcagtggtatcaacgcagagtacnnccattgtgnntagccaganntttttttttttttttttttttttttttttt

SEQ ID NO: 7332 - DNA, 84 bp, Artificial
  Barcode component
  misc_feature (33)..(34): n is a, c, g, or t
  misc_feature (43)..(44): n is a, c, g, or t
  misc_feature (53)..(54): n is a, c, g, or t
tttttttaagcagtggtatcaacgcagagtacnnccattgtgnncaatcacgnntttttttttttttttttttttttttttttt

SEQ ID NO: 7333 - DNA, 84 bp, Artificial
  Barcode component
  misc_feature (33)..(34): n is a, c, g, or t
  misc_feature (43)..(44): n is a, c, g, or t
  misc_feature (53)..(54): n is a, c, g, or t
tttttttaagcagtggtatcaacgcagagtacnnccattgtgnngcaacaagnntttttttttttttttttttttttttttttt

SEQ ID NO: 7334 - DNA, 84 bp, Artificial
  Barcode component
  misc_feature (33)..(34): n is a, c, g, or t
  misc_feature (43)..(44): n is a, c, g, or t
  misc_feature (53)..(54): n is a, c, g, or t
tttttttaagcagtggtatcaacgcagagtacnnccattgtgnncacgacaanntttttttttttttttttttttttttttttt

SEQ ID NO: 7335 - DNA, 84 bp, Artificial
  Barcode component
  misc_feature (33)..(34): n is a, c, g, or t
  misc_feature (43)..(44): n is a, c, g, or t
  misc_feature (53)..(54): n is a, c, g, or t
tttttttaagcagtggtatcaacgcagagtacnnccattgtgnntacggaganntttttttttttttttttttttttttttttt

SEQ ID NO: 7336 - DNA, 84 bp, Artificial
  Barcode component
  misc_feature (33)..(34): n is a, c, g, or t
  misc_feature (43)..(44): n is a, c, g, or t
  misc_feature (53)..(54): n is a, c, g, or t
tttttttaagcagtggtatcaacgcagagtacnnccattgtgnncgacaaganntttttttttttttttttttttttttttttt

SEQ ID NO: 7337 - DNA, 84 bp, Artificial
  Barcode component
  misc_feature (33)..(34): n is a, c, g, or t
  misc_feature (43)..(44): n is a, c, g, or t
  misc_feature (53)..(54): n is a, c, g, or t
tttttttaagcagtggtatcaacgcagagtacnnccattgtgnncgaagtganntttttttttttttttttttttttttttttt

SEQ ID NO: 7338 - DNA, 84 bp, Artificial
  Barcode component
  misc_feature (33)..(34): n is a, c, g, or t
  misc_feature (43)..(44): n is a, c, g, or t
  misc_feature (53)..(54): n is a, c, g, or t
tttttttaagcagtggtatcaacgcagagtacnnccattgtgnnagctggtanntttttttttttttttttttttttttttttt

SEQ ID NO: 7339 - DNA, 84 bp, Artificial
  Barcode component
  misc_feature (33)..(34): n is a, c, g, or t
  misc_feature (43)..(44): n is a, c, g, or t
  misc_feature (53)..(54): n is a, c, g, or t
tttttttaagcagtggtatcaacgcagagtacnnccattgtgnnaactaggcnntttttttttttttttttttttttttttttt

SEQ ID NO: 7340 - DNA, 84 bp, Artificial
  Barcode component
  misc_feature (33)..(34): n is a, c, g, or t
  misc_feature (43)..(44): n is a, c, g, or t
  misc_feature (53)..(54): n is a, c, g, or t
tttttttaagcagtggtatcaacgcagagtacnnccattgtgnncagcaagtnntttttttttttttttttttttttttttttt

SEQ ID NO: 7341 - DNA, 84 bp, Artificial
  Barcode component
  misc_feature (33)..(34): n is a, c, g, or t
  misc_feature (43)..(44): n is a, c, g, or t
  misc_feature (53)..(54): n is a, c, g, or t
tttttttaagcagtggtatcaacgcagagtacnnccattgtgnnacgaggtanntttttttttttttttttttttttttttttt

SEQ ID NO: 7342 - DNA, 84 bp, Artificial
  Barcode component
  misc_feature (33)..(34): n is a, c, g, or t
  misc_feature (43)..(44): n is a, c, g, or t
  misc_feature (53)..(54): n is a, c, g, or t
tttttttaagcagtggtatcaacgcagagtacnnccattgtgnncatcttccnntttttttttttttttttttttttttttttt

SEQ ID NO: 7343 - DNA, 84 bp, Artificial
  Barcode component
  misc_feature (33)..(34): n is a, c, g, or t
  misc_feature (43)..(44): n is a, c, g, or t
  misc_feature (53)..(54): n is a, c, g, or t
tttttttaagcagtggtatcaacgcagagtacnnccattgtgnncctgaatcnntttttttttttttttttttttttttttttt

SEQ ID NO: 7344 - DNA, 84 bp, Artificial
  Barcode component
  misc_feature (33)..(34): n is a, c, g, or t
  misc_feature (43)..(44): n is a, c, g, or t
  misc_feature (53)..(54): n is a, c, g, or t
tttttttaagcagtggtatcaacgcagagtacnnccattgtgnntgcagactnntttttttttttttttttttttttttttttt

SEQ ID NO: 7345 - DNA, 84 bp, Artificial
  Barcode component
  misc_feature (33)..(34): n is a, c, g, or t
  misc_feature (43)..(44): n is a, c, g, or t
  misc_feature (53)..(54): n is a, c, g, or t
tttttttaagcagtggtatcaacgcagagtacnnccattgtgnnagatgtggnntttttttttttttttttttttttttttttt

SEQ ID NO: 7346 - DNA, 84 bp, Artificial
  Barcode component
  misc_feature (33)..(34): n is a, c, g, or t
  misc_feature (43)..(44): n is a, c, g, or t
  misc_feature (53)..(54): n is a, c, g, or t
tttttttaagcagtggtatcaacgcagagtacnnccattgtgnnagttcgacnntttttttttttttttttttttttttttttt

SEQ ID NO: 7347 - DNA, 84 bp, Artificial
  Barcode component
  misc_feature (33)..(34): n is a, c, g, or t
  misc_feature (43)..(44): n is a, c, g, or t
  misc_feature (53)..(54): n is a, c, g, or t
tttttttaagcagtggtatcaacgcagagtacnnccattgtgnnacaacctcnntttttttttttttttttttttttttttttt

SEQ ID NO: 7348 - DNA, 84 bp, Artificial
  Barcode component
  misc_feature (33)..(34): n is a, c, g, or t
  misc_feature (43)..(44): n is a, c, g, or t
  misc_feature (53)..(54): n is a, c, g, or t
tttttttaagcagtggtatcaacgcagagtacnnccattgtgnncatggtagnntttttttttttttttttttttttttttttt

SEQ ID NO: 7349 - DNA, 84 bp, Artificial
  Barcode component
  misc_feature (33)..(34): n is a, c, g, or t
  misc_feature (43)..(44): n is a, c, g, or t
  misc_feature (53)..(54): n is a, c, g, or t
tttttttaagcagtggtatcaacgcagagtacnnccattgtgnncgtatctcnntttttttttttttttttttttttttttttt

SEQ ID NO: 7350 - DNA, 84 bp, Artificial
  Barcode component
  misc_feature (33)..(34): n is a, c, g, or t
  misc_feature (43)..(44): n is a, c, g, or t
  misc_feature (53)..(54): n is a, c, g, or t
tttttttaagcagtggtatcaacgcagagtacnnccattgtgnncctagttcnntttttttttttttttttttttttttttttt

SEQ ID NO: 7351 - DNA, 84 bp, Artificial
  Barcode component
  misc_feature (33)..(34): n is a, c, g, or t
  misc_feature (43)..(44): n is a, c, g, or t
  misc_feature (53)..(54): n is a, c, g, or t
tttttttaagcagtggtatcaacgcagagtacnnccattgtgnncaagagtcnntttttttttttttttttttttttttttttt

SEQ ID NO: 7352 - DNA, 84 bp, Artificial
  Barcode component
  misc_feature (33)..(34): n is a, c, g, or t
  misc_feature (43)..(44): n is a, c, g, or t
  misc_feature (53)..(54): n is a, c, g, or t
tttttttaagcagtggtatcaacgcagagtacnncgagattgnnaatcggcanntttttttttttttttttttttttttttttt

SEQ ID NO: 7353 - DNA, 84 bp, Artificial
  Barcode component
  misc_feature (33)..(34): n is a, c, g, or t
  misc_feature (43)..(44): n is a, c, g, or t
  misc_feature (53)..(54): n is a, c, g, or t
tttttttaagcagtggtatcaacgcagagtacnncgagattgnntacggcatnntttttttttttttttttttttttttttttt

SEQ ID NO: 7354 - DNA, 84 bp, Artificial
  Barcode component
  misc_feature (33)..(34): n is a, c, g, or t
  misc_feature (43)..(44): n is a, c, g, or t
  misc_feature (53)..(54): n is a, c, g, or t
tttttttaagcagtggtatcaacgcagagtacnncgagattgnnttggatcgnntttttttttttttttttttttttttttttt

SEQ ID NO: 7355 - DNA, 84 bp, Artificial
  Barcode component
  misc_feature (33)..(34): n is a, c, g, or t
  misc_feature (43)..(44): n is a, c, g, or t
  misc_feature (53)..(54): n is a, c, g, or t
tttttttaagcagtggtatcaacgcagagtacnncgagattgnntggaacganntttttttttttttttttttttttttttttt

SEQ ID NO: 7356 - DNA, 84 bp, Artificial
  Barcode component
  misc_feature (33)..(34): n is a, c, g, or t
  misc_feature (43)..(44): n is a, c, g, or t
  misc_feature (53)..(54): n is a, c, g, or t
tttttttaagcagtggtatcaacgcagagtacnncgagattgnnggcaatcanntttttttttttttttttttttttttttttt

SEQ ID NO: 7357 - DNA, 84 bp, Artificial
  Barcode component
  misc_feature (33)..(34): n is a, c, g, or t
  misc_feature (43)..(44): n is a, c, g, or t
  misc_feature (53)..(54): n is a, c, g, or t
tttttttaagcagtggtatcaacgcagagtacnncgagattgnngaatccganntttttttttttttttttttttttttttttt

SEQ ID NO: 7358 - DNA, 84 bp, Artificial
  Barcode component
  misc_feature (33)..(34): n is a, c, g, or t
  misc_feature (43)..(44): n is a, c, g, or t
  misc_feature (53)..(54): n is a, c, g, or t
tttttttaagcagtggtatcaacgcagagtacnncgagattgnnttacggtgnntttttttttttttttttttttttttttttt

SEQ ID NO: 7359 - DNA, 84 bp, Artificial
  Barcode component
  misc_feature (33)..(34): n is a, c, g, or t
  misc_feature (43)..(44): n is a, c, g, or t
  misc_feature (53)..(54): n is a, c, g, or t
tttttttaagcagtggtatcaacgcagagtacnncgagattgnncatatcggnntttttttttttttttttttttttttttttt

SEQ ID NO: 7360 - DNA, 84 bp, Artificial
  Barcode component
  misc_feature (33)..(34): n is a, c, g, or t
  misc_feature (43)..(44): n is a, c, g, or t
  misc_feature (53)..(54): n is a, c, g, or t
tttttttaagcagtggtatcaacgcagagtacnncgagattgnncttcggtanntttttttttttttttttttttttttttttt

SEQ ID NO: 7361 - DNA, 84 bp, Artificial
  Barcode component
  misc_feature (33)..(34): n is a, c, g, or t
  misc_feature (43)..(44): n is a, c, g, or t
  misc_feature (53)..(54): n is a, c, g, or t
tttttttaagcagtggtatcaacgcagagtacnncgagattgnntcctaacgnntttttttttttttttttttttttttttttt

SEQ ID NO: 7362 - DNA, 84 bp, Artificial
  Barcode component
  misc_feature (33)..(34): n is a, c, g, or t
  misc_feature (43)..(44): n is a, c, g, or t
  misc_feature (53)..(54): n is a, c, g, or t
tttttttaagcagtggtatcaacgcagagtacnncgagattgnngtaagccanntttttttttttttttttttttttttttttt

SEQ ID NO: 7363 - DNA, 84 bp, Artificial
  Barcode component
  misc_feature (33)..(34): n is a, c, g, or t
  misc_feature (43)..(44): n is a, c, g, or t
  misc_feature (53)..(54): n is a, c, g, or t
tttttttaagcagtggtatcaacgcagagtacnncgagattgnntaaggtggnntttttttttttttttttttttttttttttt

SEQ ID NO: 7364 - DNA, 84 bp, Artificial
  Barcode component
  misc_feature (33)..(34): n is a, c, g, or t
  misc_feature (43)..(44): n is a, c, g, or t
  misc_feature (53)..(54): n is a, c, g, or t
tttttttaagcagtggtatcaacgcagagtacnncgagattgnnggtaagctnntttttttttttttttttttttttttttttt

SEQ ID NO: 7365 - DNA, 84 bp, Artificial
  Barcode component
  misc_feature (33)..(34): n is a, c, g, or t
  misc_feature (43)..(44): n is a, c, g, or t
  misc_feature (53)..(54): n is a, c, g, or t
tttttttaagcagtggtatcaacgcagagtacnncgagattgnntgtgtcganntttttttttttttttttttttttttttttt

SEQ ID NO: 7366 - DNA, 84 bp, Artificial
  Barcode component
  misc_feature (33)..(34): n is a, c, g, or t
  misc_feature (43)..(44): n is a, c, g, or t
  misc_feature (53)..(54): n is a, c, g, or t
tttttttaagcagtggtatcaacgcagagtacnncgagattgnngagcatganntttttttttttttttttttttttttttttt

SEQ ID NO: 7367 - DNA, 84 bp, Artificial
  Barcode component
  misc_feature (33)..(34): n is a, c, g, or t
  misc_feature (43)..(44): n is a, c, g, or t
  misc_feature (53)..(54): n is a, c, g, or t
tttttttaagcagtggtatcaacgcagagtacnncgagattgnntcgaagtcnntttttttttttttttttttttttttttttt

SEQ ID NO: 7368 - DNA, 84 bp, Artificial
  Barcode component
  misc_feature (33)..(34): n is a, c, g, or t
  misc_feature (43)..(44): n is a, c, g, or t
  misc_feature (53)..(54): n is a, c, g, or t
tttttttaagcagtggtatcaacgcagagtacnncgagattgnnggtgaacanntttttttttttttttttttttttttttttt

SEQ ID NO: 7369 - DNA, 84 bp, Artificial
  Barcode component
  misc_feature (33)..(34): n is a, c, g, or t
  misc_feature (43)..(44): n is a, c, g, or t
  misc_feature (53)..(54): n is a, c, g, or t
tttttttaagcagtggtatcaacgcagagtacnncgagattgnnacatgcacnntttttttttttttttttttttttttttttt

SEQ ID NO: 7370 - DNA, 84 bp, Artificial
  Barcode component
  misc_feature (33)..(34): n is a, c, g, or t
  misc_feature (43)..(44): n is a, c, g, or t
  misc_feature (53)..(54): n is a, c, g, or t
tttttttaagcagtggtatcaacgcagagtacnncgagattgnnccaacagtnntttttttttttttttttttttttttttttt

SEQ ID NO: 7371 - DNA, 84 bp, Artificial
  Barcode component
  misc_feature (33)..(34): n is a, c, g, or t
  misc_feature (43)..(44): n is a, c, g, or t
  misc_feature (53)..(54): n is a, c, g, or t
tttttttaagcagtggtatcaacgcagagtacnncgagattgnnagaacagcnntttttttttttttttttttttttttttttt

SEQ ID NO: 7372 - DNA, 84 bp, Artificial
  Barcode component
  misc_feature (33)..(34): n is a, c, g, or t
  misc_feature (43)..(44): n is a, c, g, or t
  misc_feature (53)..(54): n is a, c, g, or t
tttttttaagcagtggtatcaacgcagagtacnncgagattgnngaacacgtnntttttttttttttttttttttttttttttt

SEQ ID NO: 7373 - DNA, 84 bp, Artificial
  Barcode component
  misc_feature (33)..(34): n is a, c, g, or t
  misc_feature (43)..(44): n is a, c, g, or t
  misc_feature (53)..(54): n is a, c, g, or t
tttttttaagcagtggtatcaacgcagagtacnncgagattgnnggtcttcanntttttttttttttttttttttttttttttt

SEQ ID NO: 7374 - DNA, 84 bp, Artificial
  Barcode component
  misc_feature (33)..(34): n is a, c, g, or t
  misc_feature (43)..(44): n is a, c, g, or t
  misc_feature (53)..(54): n is a, c, g, or t
tttttttaagcagtggtatcaacgcagagtacnncgagattgnnaggttcagnntttttttttttttttttttttttttttttt

SEQ ID NO: 7375 - DNA, 84 bp, Artificial
  Barcode component
  misc_feature (33)..(34): n is a, c, g, or t
  misc_feature (43)..(44): n is a, c, g, or t
  misc_feature (53)..(54): n is a, c, g, or t
tttttttaagcagtggtatcaacgcagagtacnncgagattgnnctagagcanntttttttttttttttttttttttttttttt

SEQ ID NO: 7376 - DNA, 84 bp, Artificial
  Barcode component
  misc_feature (33)..(34): n is a, c, g, or t
  misc_feature (43)..(44): n is a, c, g, or t
  misc_feature (53)..(54): n is a, c, g, or t
tttttttaagcagtggtatcaacgcagagtacnncgagattgnncttctagcnntttttttttttttttttttttttttttttt

SEQ ID NO: 7377 - DNA, 84 bp, Artificial
  Barcode component
  misc_feature (33)..(34): n is a, c, g, or t
  misc_feature (43)..(44): n is a, c, g, or t
  misc_feature (53)..(54): n is a, c, g, or t
tttttttaagcagtggtatcaacgcagagtacnncgagattgnngagtaacgnntttttttttttttttttttttttttttttt

SEQ ID NO: 7378 - DNA, 84 bp, Artificial
  Barcode component
  misc_feature (33)..(34): n is a, c, g, or t
  misc_feature (43)..(44): n is a, c, g, or t
  misc_feature (53)..(54): n is a, c, g, or t
tttttttaagcagtggtatcaacgcagagtacnncgagattgnnctaagaggnntttttttttttttttttttttttttttttt

SEQ ID NO: 7379 - DNA, 84 bp, Artificial
  Barcode component
  misc_feature (33)..(34): n is a, c, g, or t
  misc_feature (43)..(44): n is a, c, g, or t
  misc_feature (53)..(54): n is a, c, g, or t
tttttttaagcagtggtatcaacgcagagtacnncgagattgnnacgtgtagnntttttttttttttttttttttttttttttt

SEQ ID NO: 7380 - DNA, 84 bp, Artificial
  Barcode component
  misc_feature (33)..(34): n is a, c, g, or t
  misc_feature (43)..(44): n is a, c, g, or t
  misc_feature (53)..(54): n is a, c, g, or t
tttttttaagcagtggtatcaacgcagagtacnncgagattgnnactacaggnntttttttttttttttttttttttttttttt

SEQ ID NO: 7381 - DNA, 84 bp, Artificial
  Barcode component
  misc_feature (33)..(34): n is a, c, g, or t
  misc_feature (43)..(44): n is a, c, g, or t
  misc_feature (53)..(54): n is a, c, g, or t
tttttttaagcagtggtatcaacgcagagtacnncgagattgnntacaggtcnntttttttttttttttttttttttttttttt

SEQ ID NO: 7382 - DNA, 84 bp, Artificial
  Barcode component
  misc_feature (33)..(34): n is a, c, g, or t
  misc_feature (43)..(44): n is a, c, g, or t
  misc_feature (53)..(54): n is a, c, g, or t
tttttttaagcagtggtatcaacgcagagtacnncgagattgnnctcacatgnntttttttttttttttttttttttttttttt

SEQ ID NO: 7383 - DNA, 84 bp, Artificial
  Barcode component
  misc_feature (33)..(34): n is a, c, g, or t
  misc_feature (43)..(44): n is a, c, g, or t
  misc_feature (53)..(54): n is a, c, g, or t
tttttttaagcagtggtatcaacgcagagtacnncgagattgnnactaggagnntttttttttttttttttttttttttttttt

SEQ ID NO: 7384 - DNA, 84 bp, Artificial
  Barcode component
  misc_feature (33)..(34): n is a, c, g, or t
  misc_feature (43)..(44): n is a, c, g, or t
  misc_feature (53)..(54): n is a, c, g, or t
tttttttaagcagtggtatcaacgcagagtacnncgagattgnnccatagganntttttttttttttttttttttttttttttt

SEQ ID NO: 7385 - DNA, 84 bp, Artificial
  Barcode component
  misc_feature (33)..(34): n is a, c, g, or t
  misc_feature (43)..(44): n is a, c, g, or t
  misc_feature (53)..(54): n is a, c, g, or t
tttttttaagcagtggtatcaacgcagagtacnncgagattgnnggagaatcnntttttttttttttttttttttttttttttt

SEQ ID NO: 7386 - DNA, 84 bp, Artificial
  Barcode component
  misc_feature (33)..(34): n is a, c, g, or t
  misc_feature (43)..(44): n is a, c, g, or t
  misc_feature (53)..(54): n is a, c, g, or t
tttttttaagcagtggtatcaacgcagagtacnncgagattgnngccaagaanntttttttttttttttttttttttttttttt

SEQ ID NO: 7387 - DNA, 84 bp, Artificial
  Barcode component
  misc_feature (33)..(34): n is a, c, g, or t
  misc_feature (43)..(44): n is a, c, g, or t
  misc_feature (53)..(54): n is a, c, g, or t
tttttttaagcagtggtatcaacgcagagtacnncgagattgnnaaggcaagnntttttttttttttttttttttttttttttt

SEQ ID NO: 7388 - DNA, 84 bp, Artificial
  Barcode component
  misc_feature (33)..(34): n is a, c, g, or t
  misc_feature (43)..(44): n is a, c, g, or t
  misc_feature (53)..(54): n is a, c, g, or t
tttttttaagcagtggtatcaacgcagagtacnncgagattgnnaatgtcgcnntttttttttttttttttttttttttttttt

SEQ ID NO: 7389 - DNA, 84 bp, Artificial
  Barcode component
  misc_feature (33)..(34): n is a, c, g, or t
  misc_feature (43)..(44): n is a, c, g, or t
  misc_feature (53)..(54): n is a, c, g, or t
tttttttaagcagtggtatcaacgcagagtacnncgagattgnnatggaaccnntttttttttttttttttttttttttttttt

SEQ ID NO: 7390 - DNA, 84 bp, Artificial
  Barcode component
  misc_feature (33)..(34): n is a, c, g, or t
  misc_feature (43)..(44): n is a, c, g, or t
  misc_feature (53)..(54): n is a, c, g, or t
tttttttaagcagtggtatcaacgcagagtacnncgagattgnnagaggcatnntttttttttttttttttttttttttttttt

SEQ ID NO: 7391 - DNA, 84 bp, Artificial
  Barcode component
  misc_feature (33)..(34): n is a, c, g, or t
  misc_feature (43)..(44): n is a, c, g, or t
  misc_feature (53)..(54): n is a, c, g, or t
tttttttaagcagtggtatcaacgcagagtacnncgagattgnntgcatagcnntttttttttttttttttttttttttttttt

SEQ ID NO: 7392 - DNA, 84 bp, Artificial
  Barcode component
  misc_feature (33)..(34): n is a, c, g, or t
  misc_feature (43)..(44): n is a, c, g, or t
  misc_feature (53)..(54): n is a, c, g, or t
tttttttaagcagtggtatcaacgcagagtacnncgagattgnnctaacgganntttttttttttttttttttttttttttttt

SEQ ID NO: 7393 - DNA, 84 bp, Artificial
  Barcode component
  misc_feature (33)..(34): n is a, c, g, or t
  misc_feature (43)..(44): n is a, c, g, or t
  misc_feature (53)..(54): n is a, c, g, or t
tttttttaagcagtggtatcaacgcagagtacnncgagattgnntatcgaggnntttttttttttttttttttttttttttttt

SEQ ID NO: 7394 - DNA, 84 bp, Artificial
  Barcode component
  misc_feature (33)..(34): n is a, c, g, or t
  misc_feature (43)..(44): n is a, c, g, or t
  misc_feature (53)..(54): n is a, c, g, or t
tttttttaagcagtggtatcaacgcagagtacnncgagattgnncatagcctnntttttttttttttttttttttttttttttt

SEQ ID NO: 7395 - DNA, 84 bp, Artificial
  Barcode component
  misc_feature (33)..(34): n is a, c, g, or t
  misc_feature (43)..(44): n is a, c, g, or t
  misc_feature (53)..(54): n is a, c, g, or t
tttttttaagcagtggtatcaacgcagagtacnncgagattgnnatcgagacnntttttttttttttttttttttttttttttt

SEQ ID NO: 7396 - DNA, 84 bp, Artificial
  Barcode component
  misc_feature (33)..(34): n is a, c, g, or t
  misc_feature (43)..(44): n is a, c, g, or t
  misc_feature (53)..(54): n is a, c, g, or t
tttttttaagcagtggtatcaacgcagagtacnncgagattgnnggaagagtnntttttttttttttttttttttttttttttt

SEQ ID NO: 7397 - DNA, 84 bp, Artificial
  Barcode component
  misc_feature (33)..(34): n is a, c, g, or t
  misc_feature (43)..(44): n is a, c, g, or t
  misc_feature (53)..(54): n is a, c, g, or t
tttttttaagcagtggtatcaacgcagagtacnncgagattgnnccaagtagnntttttttttttttttttttttttttttttt

SEQ ID NO: 7398 - DNA, 84 bp, Artificial
  Barcode component
  misc_feature (33)..(34): n is a, c, g, or t
  misc_feature (43)..(44): n is a, c, g, or t
  misc_feature (53)..(54): n is a, c, g, or t
tttttttaagcagtggtatcaacgcagagtacnncgagattgnnctgaacagnntttttttttttttttttttttttttttttt

SEQ ID NO: 7399 - DNA, 84 bp, Artificial
  Barcode component
  misc_feature (33)..(34): n is a, c, g, or t
  misc_feature (43)..(44): n is a, c, g, or t
  misc_feature (53)..(54): n is a, c, g, or t
tttttttaagcagtggtatcaacgcagagtacnncgagattgnngtaggttcnntttttttttttttttttttttttttttttt

SEQ ID NO: 7400 - DNA, 84 bp, Artificial
  Barcode component
  misc_feature (33)..(34): n is a, c, g, or t
  misc_feature (43)..(44): n is a, c, g, or t
  misc_feature (53)..(54): n is a, c, g, or t
tttttttaagcagtggtatcaacgcagagtacnncgagattgnngtatggacnntttttttttttttttttttttttttttttt

SEQ ID NO: 7401 - DNA, 84 bp, Artificial
  Barcode component
  misc_feature (33)..(34): n is a, c, g, or t
  misc_feature (43)..(44): n is a, c, g, or t
  misc_feature (53)..(54): n is a, c, g, or t
tttttttaagcagtggtatcaacgcagagtacnncgagattgnntcgcaacanntttttttttttttttttttttttttttttt

SEQ ID NO: 7402 - DNA, 84 bp, Artificial
  Barcode component
  misc_feature (33)..(34): n is a, c, g, or t
  misc_feature (43)..(44): n is a, c, g, or t
  misc_feature (53)..(54): n is a, c, g, or t
tttttttaagcagtggtatcaacgcagagtacnncgagattgnnccgctaatnntttttttttttttttttttttttttttttt

SEQ ID NO: 7403 - DNA, 84 bp, Artificial
  Barcode component
  misc_feature (33)..(34): n is a, c, g, or t
  misc_feature (43)..(44): n is a, c, g, or t
  misc_feature (53)..(54): n is a, c, g, or t
tttttttaagcagtggtatcaacgcagagtacnncgagattgnngattcgcanntttttttttttttttttttttttttttttt

SEQ ID NO: 7404 - DNA, 84 bp, Artificial
  Barcode component
  misc_feature (33)..(34): n is a, c, g, or t
  misc_feature (43)..(44): n is a, c, g, or t
  misc_feature (53)..(54): n is a, c, g, or t
tttttttaagcagtggtatcaacgcagagtacnncgagattgnncgatggaanntttttttttttttttttttttttttttttt

SEQ ID NO: 7405 - DNA, 84 bp, Artificial
  Barcode component
  misc_feature (33)..(34): n is a, c, g, or t
  misc_feature (43)..(44): n is a, c, g, or t
  misc_feature (53)..(54): n is a, c, g, or t
tttttttaagcagtggtatcaacgcagagtacnncgagattgnnagcaagganntttttttttttttttttttttttttttttt

SEQ ID NO: 7406 - DNA, 84 bp, Artificial
  Barcode component
  misc_feature (33)..(34): n is a, c, g, or t
  misc_feature (43)..(44): n is a, c, g, or t
  misc_feature (53)..(54): n is a, c, g, or t
tttttttaagcagtggtatcaacgcagagtacnncgagattgnncgtagcaanntttttttttttttttttttttttttttttt

SEQ ID NO: 7407 - DNA, 84 bp, Artificial
  Barcode component
  misc_feature (33)..(34): n is a, c, g, or t
  misc_feature (43)..(44): n is a, c, g, or t
  misc_feature (53)..(54): n is a, c, g, or t
tttttttaagcagtggtatcaacgcagagtacnncgagattgnntggcagtanntttttttttttttttttttttttttttttt

SEQ ID NO: 7408 - DNA, 84 bp, Artificial
  Barcode component
  misc_feature (33)..(34): n is a, c, g, or t
  misc_feature (43)..(44): n is a, c, g, or t
  misc_feature (53)..(54): n is a, c, g, or t
tttttttaagcagtggtatcaacgcagagtacnncgagattgnncggtagttnntttttttttttttttttttttttttttttt

SEQ ID NO: 7409 - DNA, 84 bp, Artificial
  Barcode component
  misc_feature (33)..(34): n is a, c, g, or t
  misc_feature (43)..(44): n is a, c, g, or t
  misc_feature (53)..(54): n is a, c, g, or t
tttttttaagcagtggtatcaacgcagagtacnncgagattgnntgacttcgnntttttttttttttttttttttttttttttt

SEQ ID NO: 7410 - DNA, 84 bp, Artificial
  Barcode component
  misc_feature (33)..(34): n is a, c, g, or t
  misc_feature (43)..(44): n is a, c, g, or t
  misc_feature (53)..(54): n is a, c, g, or t
tttttttaagcagtggtatcaacgcagagtacnncgagattgnngagtgcaanntttttttttttttttttttttttttttttt

SEQ ID NO: 7411 - DNA, 84 bp, Artificial
  Barcode component
  misc_feature (33)..(34): n is a, c, g, or t
  misc_feature (43)..(44): n is a, c, g, or t
  misc_feature (53)..(54): n is a, c, g, or t
tttttttaagcagtggtatcaacgcagagtacnncgagattgnnacggtaacnntttttttttttttttttttttttttttttt

SEQ ID NO: 7412 - DNA, 84 bp, Artificial
  Barcode component
  misc_feature (33)..(34): n is a, c, g, or t
  misc_feature (43)..(44): n is a, c, g, or t
  misc_feature (53)..(54): n is a, c, g, or t
tttttttaagcagtggtatcaacgcagagtacnncgagattgnnaagtggtgnntttttttttttttttttttttttttttttt

SEQ ID NO: 7413 - DNA, 84 bp, Artificial
  Barcode component
  misc_feature (33)..(34): n is a, c, g, or t
  misc_feature (43)..(44): n is a, c, g, or t
  misc_feature (53)..(54): n is a, c, g, or t
tttttttaagcagtggtatcaacgcagagtacnncgagattgnnggagacaanntttttttttttttttttttttttttttttt

SEQ ID NO: 7414 - DNA, 84 bp, Artificial
  Barcode component
  misc_feature (33)..(34): n is a, c, g, or t
  misc_feature (43)..(44): n is a, c, g, or t
  misc_feature (53)..(54): n is a, c, g, or t
tttttttaagcagtggtatcaacgcagagtacnncgagattgnntcaaggacnntttttttttttttttttttttttttttttt

SEQ ID NO: 7415 - DNA, 84 bp, Artificial
  Barcode component
  misc_feature (33)..(34): n is a, c, g, or t
  misc_feature (43)..(44): n is a, c, g, or t
  misc_feature (53)..(54): n is a, c, g, or t
tttttttaagcagtggtatcaacgcagagtacnncgagattgnnaagagagcnntttttttttttttttttttttttttttttt

SEQ ID NO: 7416 - DNA, 84 bp, Artificial
  Barcode component
  misc_feature (33)..(34): n is a, c, g, or t
  misc_feature (43)..(44): n is a, c, g, or t
  misc_feature (53)..(54): n is a, c, g, or t
tttttttaagcagtggtatcaacgcagagtacnncgagattgnncgagagatnntttttttttttttttttttttttttttttt

SEQ ID NO: 7417 - DNA, 84 bp, Artificial
  Barcode component
  misc_feature (33)..(34): n is a, c, g, or t
  misc_feature (43)..(44): n is a, c, g, or t
  misc_feature (53)..(54): n is a, c, g, or t
tttttttaagcagtggtatcaacgcagagtacnncgagattgnnacagatggnntttttttttttttttttttttttttttttt

SEQ ID NO: 7418 - DNA, 84 bp, Artificial
  Barcode component
  misc_feature (33)..(34): n is a, c, g, or t
  misc_feature (43)..(44): n is a, c, g, or t
  misc_feature (53)..(54): n is a, c, g, or t
tttttttaagcagtggtatcaacgcagagtacnncgagattgnnaggagtcanntttttttttttttttttttttttttttttt

SEQ ID NO: 7419 - DNA, 84 bp, Artificial
  Barcode component
  misc_feature (33)..(34): n is a, c, g, or t
  misc_feature (43)..(44): n is a, c, g, or t
  misc_feature (53)..(54): n is a, c, g, or t
tttttttaagcagtggtatcaacgcagagtacnncgagattgnncgtgttacnntttttttttttttttttttttttttttttt

SEQ ID NO: 7420 - DNA, 84 bp, Artificial
  Barcode component
  misc_feature (33)..(34): n is a, c, g, or t
  misc_feature (43)..(44): n is a, c, g, or t
  misc_feature (53)..(54): n is a, c, g, or t
tttttttaagcagtggtatcaacgcagagtacnncgagattgnntagtgtgcnntttttttttttttttttttttttttttttt

SEQ ID NO: 7421 - DNA, 84 bp, Artificial
  Barcode component
  misc_feature (33)..(34): n is a, c, g, or t
  misc_feature (43)..(44): n is a, c, g, or t
  misc_feature (53)..(54): n is a, c, g, or t
tttttttaagcagtggtatcaacgcagagtacnncgagattgnnctcatgacnntttttttttttttttttttttttttttttt

SEQ ID NO: 7422 - DNA, 84 bp, Artificial
  Barcode component
  misc_feature (33)..(34): n is a, c, g, or t
  misc_feature (43)..(44): n is a, c, g, or t
  misc_feature (53)..(54): n is a, c, g, or t
tttttttaagcagtggtatcaacgcagagtacnncgagattgnngtatccagnntttttttttttttttttttttttttttttt

SEQ ID NO: 7423 - DNA, 84 bp, Artificial
  Barcode component
  misc_feature (33)..(34): n is a, c, g, or t
  misc_feature (43)..(44): n is a, c, g, or t
  misc_feature (53)..(54): n is a, c, g, or t
tttttttaagcagtggtatcaacgcagagtacnncgagattgnnacgcctatnntttttttttttttttttttttttttttttt

SEQ ID NO: 7424 - DNA, 84 bp, Artificial
  Barcode component
  misc_feature (33)..(34): n is a, c, g, or t
  misc_feature (43)..(44): n is a, c, g, or t
  misc_feature (53)..(54): n is a, c, g, or t
tttttttaagcagtggtatcaacgcagagtacnncgagattgnnaacgacctnntttttttttttttttttttttttttttttt

SEQ ID NO: 7425 - DNA, 84 bp, Artificial
  Barcode component
  misc_feature (33)..(34): n is a, c, g, or t
  misc_feature (43)..(44): n is a, c, g, or t
  misc_feature (53)..(54): n is a, c, g, or t
tttttttaagcagtggtatcaacgcagagtacnncgagattgnnatcaggctnntttttttttttttttttttttttttttttt

SEQ ID NO: 7426 - DNA, 84 bp, Artificial
  Barcode component
  misc_feature (33)..(34): n is a, c, g, or t
  misc_feature (43)..(44): n is a, c, g, or t
  misc_feature (53)..(54): n is a, c, g, or t
tttttttaagcagtggtatcaacgcagagtacnncgagattgnncaagttcgnntttttttttttttttttttttttttttttt

SEQ ID NO: 7427 - DNA, 84 bp, Artificial
  Barcode component
  misc_feature (33)..(34): n is a, c, g, or t
  misc_feature (43)..(44): n is a, c, g, or t
  misc_feature (53)..(54): n is a, c, g, or t
tttttttaagcagtggtatcaacgcagagtacnncgagattgnntagccaganntttttttttttttttttttttttttttttt

SEQ ID NO: 7428 - DNA, 84 bp, Artificial
  Barcode component
  misc_feature (33)..(34): n is a, c, g, or t
  misc_feature (43)..(44): n is a, c, g, or t
  misc_feature (53)..(54): n is a, c, g, or t
tttttttaagcagtggtatcaacgcagagtacnncgagattgnncaatcacgnntttttttttttttttttttttttttttttt

SEQ ID NO: 7429 - DNA, 84 bp, Artificial
  Barcode component
  misc_feature (33)..(34): n is a, c, g, or t
  misc_feature (43)..(44): n is a, c, g, or t
  misc_feature (53)..(54): n is a, c, g, or t
tttttttaagcagtggtatcaacgcagagtacnncgagattgnngcaacaagnntttttttttttttttttttttttttttttt

SEQ ID NO: 7430 - DNA, 84 bp, Artificial
  Barcode component
  misc_feature (33)..(34): n is a, c, g, or t
  misc_feature (43)..(44): n is a, c, g, or t
  misc_feature (53)..(54): n is a, c, g, or t
tttttttaagcagtggtatcaacgcagagtacnncgagattgnncacgacaanntttttttttttttttttttttttttttttt

SEQ ID NO: 7431 - DNA, 84 bp, Artificial
  Barcode component
  misc_feature (33)..(34): n is a, c, g, or t
  misc_feature (43)..(44): n is a, c, g, or t
  misc_feature (53)..(54): n is a, c, g, or t
tttttttaagcagtggtatcaacgcagagtacnncgagattgnntacggaganntttttttttttttttttttttttttttttt

SEQ ID NO: 7432 - DNA, 84 bp, Artificial
  Barcode component
  misc_feature (33)..(34): n is a, c, g, or t
  misc_feature (43)..(44): n is a, c, g, or t
  misc_feature (53)..(54): n is a, c, g, or t
tttttttaagcagtggtatcaacgcagagtacnncgagattgnncgacaaganntttttttttttttttttttttttttttttt

SEQ ID NO: 7433 - DNA, 84 bp, Artificial
  Barcode component
  misc_feature (33)..(34): n is a, c, g, or t
  misc_feature (43)..(44): n is a, c, g, or t
  misc_feature (53)..(54): n is a, c, g, or t
tttttttaagcagtggtatcaacgcagagtacnncgagattgnncgaagtganntttttttttttttttttttttttttttttt

SEQ ID NO: 7434 - DNA, 84 bp, Artificial
  Barcode component
  misc_feature (33)..(34): n is a, c, g, or t
  misc_feature (43)..(44): n is a, c, g, or t
  misc_feature (53)..(54): n is a, c, g, or t
tttttttaagcagtggtatcaacgcagagtacnncgagattgnnagctggtanntttttttttttttttttttttttttttttt

SEQ ID NO: 7435 - DNA, 84 bp, Artificial
  Barcode component
  misc_feature (33)..(34): n is a, c, g, or t
  misc_feature (43)..(44): n is a, c, g, or t
  misc_feature (53)..(54): n is a, c, g, or t
tttttttaagcagtggtatcaacgcagagtacnncgagattgnnaactaggcnntttttttttttttttttttttttttttttt

SEQ ID NO: 7436 - DNA, 84 bp, Artificial
  Barcode component
  misc_feature (33)..(34): n is a, c, g, or t
  misc_feature (43)..(44): n is a, c, g, or t
  misc_feature (53)..(54): n is a, c, g, or t
tttttttaagcagtggtatcaacgcagagtacnncgagattgnncagcaagtnntttttttttttttttttttttttttttttt

SEQ ID NO: 7437 - DNA, 84 bp, Artificial
  Barcode component
  misc_feature (33)..(34): n is a, c, g, or t
  misc_feature (43)..(44): n is a, c, g, or t
  misc_feature (53)..(54): n is a, c, g, or t
tttttttaagcagtggtatcaacgcagagtacnncgagattgnnacgaggtanntttttttttttttttttttttttttttttt

SEQ ID NO: 7438 - DNA, 84 bp, Artificial
  Barcode component
  misc_feature (33)..(34): n is a, c, g, or t
  misc_feature (43)..(44): n is a, c, g, or t
  misc_feature (53)..(54): n is a, c, g, or t
tttttttaagcagtggtatcaacgcagagtacnncgagattgnncatcttccnntttttttttttttttttttttttttttttt

SEQ ID NO: 7439 - DNA, 84 bp, Artificial
  Barcode component
  misc_feature (33)..(34): n is a, c, g, or t
  misc_feature (43)..(44): n is a, c, g, or t
  misc_feature (53)..(54): n is a, c, g, or t
tttttttaagcagtggtatcaacgcagagtacnncgagattgnncctgaatcnntttttttttttttttttttttttttttttt

SEQ ID NO: 7440 - DNA, 84 bp, Artificial
  Barcode component
  misc_feature (33)..(34): n is a, c, g, or t
  misc_feature (43)..(44): n is a, c, g, or t
  misc_feature (53)..(54): n is a, c, g, or t
tttttttaagcagtggtatcaacgcagagtacnncgagattgnntgcagactnntttttttttttttttttttttttttttttt

SEQ ID NO: 7441 - DNA, 84 bp, Artificial
  Barcode component
  misc_feature (33)..(34): n is a, c, g, or t
  misc_feature (43)..(44): n is a, c, g, or t
  misc_feature (53)..(54): n is a, c, g, or t
tttttttaagcagtggtatcaacgcagagtacnncgagattgnnagatgtggnntttttttttttttttttttttttttttttt

SEQ ID NO: 7442 - DNA, 84 bp, Artificial
  Barcode component
  misc_feature (33)..(34): n is a, c, g, or t
  misc_feature (43)..(44): n is a, c, g, or t
  misc_feature (53)..(54): n is a, c, g, or t
tttttttaagcagtggtatcaacgcagagtacnncgagattgnnagttcgacnntttttttttttttttttttttttttttttt

SEQ ID NO: 7443 - DNA, 84 bp, Artificial
  Barcode component
  misc_feature (33)..(34): n is a, c, g, or t
  misc_feature (43)..(44): n is a, c, g, or t
  misc_feature (53)..(54): n is a, c, g, or t
tttttttaagcagtggtatcaacgcagagtacnncgagattgnnacaacctcnntttttttttttttttttttttttttttttt

SEQ ID NO: 7444 - DNA, 84 bp, Artificial
  Barcode component
  misc_feature (33)..(34): n is a, c, g, or t
  misc_feature (43)..(44): n is a, c, g, or t
  misc_feature (53)..(54): n is a, c, g, or t
tttttttaagcagtggtatcaacgcagagtacnncgagattgnncatggtagnntttttttttttttttttttttttttttttt

SEQ ID NO: 7445 - DNA, 84 bp, Artificial
  Barcode component
  misc_feature (33)..(34): n is a, c, g, or t
  misc_feature (43)..(44): n is a, c, g, or t
  misc_feature (53)..(54): n is a, c, g, or t
tttttttaagcagtggtatcaacgcagagtacnncgagattgnncgtatctcnntttttttttttttttttttttttttttttt

SEQ ID NO: 7446 - DNA, 84 bp, Artificial
  Barcode component
  misc_feature (33)..(34): n is a, c, g, or t
  misc_feature (43)..(44): n is a, c, g, or t
  misc_feature (53)..(54): n is a, c, g, or t
tttttttaagcagtggtatcaacgcagagtacnncgagattgnncctagttcnntttttttttttttttttttttttttttttt

SEQ ID NO: 7447 - DNA, 84 bp, Artificial
  Barcode component
  misc_feature (33)..(34): n is a, c, g, or t
  misc_feature (43)..(44): n is a, c, g, or t
  misc_feature (53)..(54): n is a, c, g, or t
tttttttaagcagtggtatcaacgcagagtacnncgagattgnncaagagtcnntttttttttttttttttttttttttttttt

SEQ ID NO: 7448 - DNA, 84 bp, Artificial
  Barcode component
  misc_feature (33)..(34): n is a, c, g, or t
  misc_feature (43)..(44): n is a, c, g, or t
  misc_feature (53)..(54): n is a, c, g, or t
tttttttaagcagtggtatcaacgcagagtacnntgtggaagnnaatcggcanntttttttttttttttttttttttttttttt

SEQ ID NO: 7449 - DNA, 84 bp, Artificial
  Barcode component
  misc_feature (33)..(34): n is a, c, g, or t
  misc_feature (43)..(44): n is a, c, g, or t
  misc_feature (53)..(54): n is a, c, g, or t
tttttttaagcagtggtatcaacgcagagtacnntgtggaagnntacggcatnntttttttttttttttttttttttttttttt

SEQ ID NO: 7450 - DNA, 84 bp, Artificial
  Barcode component
  misc_feature (33)..(34): n is a, c, g, or t
  misc_feature (43)..(44): n is a, c, g, or t
  misc_feature (53)..(54): n is a, c, g, or t
tttttttaagcagtggtatcaacgcagagtacnntgtggaagnnttggatcgnntttttttttttttttttttttttttttttt

SEQ ID NO: 7451 - DNA, 84 bp, Artificial
  Barcode component
  misc_feature (33)..(34): n is a, c, g, or t
  misc_feature (43)..(44): n is a, c, g, or t
  misc_feature (53)..(54): n is a, c, g, or t
tttttttaagcagtggtatcaacgcagagtacnntgtggaagnntggaacganntttttttttttttttttttttttttttttt

SEQ ID NO: 7452 - DNA, 84 bp, Artificial
  Barcode component
  misc_feature (33)..(34): n is a, c, g, or t
  misc_feature (43)..(44): n is a, c, g, or t
  misc_feature (53)..(54): n is a, c, g, or t
tttttttaagcagtggtatcaacgcagagtacnntgtggaagnnggcaatcanntttttttttttttttttttttttttttttt

SEQ ID NO: 7453 - DNA, 84 bp, Artificial
  Barcode component
  misc_feature (33)..(34): n is a, c, g, or t
  misc_feature (43)..(44): n is a, c, g, or t
  misc_feature (53)..(54): n is a, c, g, or t
tttttttaagcagtggtatcaacgcagagtacnntgtggaagnngaatccganntttttttttttttttttttttttttttttt

SEQ ID NO: 7454 - DNA, 84 bp, Artificial
  Barcode component
  misc_feature (33)..(34): n is a, c, g, or t
  misc_feature (43)..(44): n is a, c, g, or t
  misc_feature (53)..(54): n is a, c, g, or t
tttttttaagcagtggtatcaacgcagagtacnntgtggaagnnttacggtgnntttttttttttttttttttttttttttttt

SEQ ID NO: 7455 - DNA, 84 bp, Artificial
  Barcode component
  misc_feature (33)..(34): n is a, c, g, or t
  misc_feature (43)..(44): n is a, c, g, or t
  misc_feature (53)..(54): n is a, c, g, or t
tttttttaagcagtggtatcaacgcagagtacnntgtggaagnncatatcggnntttttttttttttttttttttttttttttt

SEQ ID NO: 7456 - DNA, 84 bp, Artificial
  Barcode component
  misc_feature (33)..(34): n is a, c, g, or t
  misc_feature (43)..(44): n is a, c, g, or t
  misc_feature (53)..(54): n is a, c, g, or t
tttttttaagcagtggtatcaacgcagagtacnntgtggaagnncttcggtanntttttttttttttttttttttttttttttt

SEQ ID NO: 7457 - DNA, 84 bp, Artificial
  Barcode component
  misc_feature (33)..(34): n is a, c, g, or t
  misc_feature (43)..(44): n is a, c, g, or t
  misc_feature (53)..(54): n is a, c, g, or t
tttttttaagcagtggtatcaacgcagagtacnntgtggaagnntcctaacgnntttttttttttttttttttttttttttttt

SEQ ID NO: 7458 - DNA, 84 bp, Artificial
  Barcode component
  misc_feature (33)..(34): n is a, c, g, or t
  misc_feature (43)..(44): n is a, c, g, or t
  misc_feature (53)..(54): n is a, c, g, or t
tttttttaagcagtggtatcaacgcagagtacnntgtggaagnngtaagccanntttttttttttttttttttttttttttttt

SEQ ID NO: 7459 - DNA, 84 bp, Artificial
  Barcode component
  misc_feature (33)..(34): n is a, c, g, or t
  misc_feature (43)..(44): n is a, c, g, or t
  misc_feature (53)..(54): n is a, c, g, or t
tttttttaagcagtggtatcaacgcagagtacnntgtggaagnntaaggtggnntttttttttttttttttttttttttttttt

SEQ ID NO: 7460 - DNA, 84 bp, Artificial
  Barcode component
  misc_feature (33)..(34): n is a, c, g, or t
  misc_feature (43)..(44): n is a, c, g, or t
  misc_feature (53)..(54): n is a, c, g, or t
tttttttaagcagtggtatcaacgcagagtacnntgtggaagnnggtaagctnntttttttttttttttttttttttttttttt

SEQ ID NO: 7461 - DNA, 84 bp, Artificial
  Barcode component
  misc_feature (33)..(34): n is a, c, g, or t
  misc_feature (43)..(44): n is a, c, g, or t
  misc_feature (53)..(54): n is a, c, g, or t
tttttttaagcagtggtatcaacgcagagtacnntgtggaagnntgtgtcganntttttttttttttttttttttttttttttt

SEQ ID NO: 7462 - DNA, 84 bp, Artificial
  Barcode component
  misc_feature (33)..(34): n is a, c, g, or t
  misc_feature (43)..(44): n is a, c, g, or t
  misc_feature (53)..(54): n is a, c, g, or t
tttttttaagcagtggtatcaacgcagagtacnntgtggaagnngagcatganntttttttttttttttttttttttttttttt

SEQ ID NO: 7463 - DNA, 84 bp, Artificial
  Barcode component
  misc_feature (33)..(34): n is a, c, g, or t
  misc_feature (43)..(44): n is a, c, g, or t
  misc_feature (53)..(54): n is a, c, g, or t
tttttttaagcagtggtatcaacgcagagtacnntgtggaagnntcgaagtcnntttttttttttttttttttttttttttttt

SEQ ID NO: 7464 - DNA, 84 bp, Artificial
  Barcode component
  misc_feature (33)..(34): n is a, c, g, or t
  misc_feature (43)..(44): n is a, c, g, or t
  misc_feature (53)..(54): n is a, c, g, or t
tttttttaagcagtggtatcaacgcagagtacnntgtggaagnnggtgaacanntttttttttttttttttttttttttttttt

SEQ ID NO: 7465 - DNA, 84 bp, Artificial
  Barcode component
  misc_feature (33)..(34): n is a, c, g, or t
  misc_feature (43)..(44): n is a, c, g, or t
  misc_feature (53)..(54): n is a, c, g, or t
tttttttaagcagtggtatcaacgcagagtacnntgtggaagnnacatgcacnntttttttttttttttttttttttttttttt

SEQ ID NO: 7466 - DNA, 84 bp, Artificial
  Barcode component
  misc_feature (33)..(34): n is a, c, g, or t
  misc_feature (43)..(44): n is a, c, g, or t
  misc_feature (53)..(54): n is a, c, g, or t
tttttttaagcagtggtatcaacgcagagtacnntgtggaagnnccaacagtnntttttttttttttttttttttttttttttt

SEQ ID NO: 7467 - DNA, 84 bp, Artificial
  Barcode component
  misc_feature (33)..(34): n is a, c, g, or t
  misc_feature (43)..(44): n is a, c, g, or t
  misc_feature (53)..(54): n is a, c, g, or t
tttttttaagcagtggtatcaacgcagagtacnntgtggaagnnagaacagcnntttttttttttttttttttttttttttttt

SEQ ID NO: 7468 - DNA, 84 bp, Artificial
  Barcode component
  misc_feature (33)..(34): n is a, c, g, or t
  misc_feature (43)..(44): n is a, c, g, or t
  misc_feature (53)..(54): n is a, c, g, or t
tttttttaagcagtggtatcaacgcagagtacnntgtggaagnngaacacgtnntttttttttttttttttttttttttttttt

SEQ ID NO: 7469 - DNA, 84 bp, Artificial
  Barcode component
  misc_feature (33)..(34): n is a, c, g, or t
  misc_feature (43)..(44): n is a, c, g, or t
  misc_feature (53)..(54): n is a, c, g, or t
tttttttaagcagtggtatcaacgcagagtacnntgtggaagnnggtcttcanntttttttttttttttttttttttttttttt

SEQ ID NO: 7470 - DNA, 84 bp, Artificial
  Barcode component
  misc_feature (33)..(34): n is a, c, g, or t
  misc_feature (43)..(44): n is a, c, g, or t
  misc_feature (53)..(54): n is a, c, g, or t
tttttttaagcagtggtatcaacgcagagtacnntgtggaagnnaggttcagnntttttttttttttttttttttttttttttt

SEQ ID NO: 7471 - DNA, 84 bp, Artificial
  Barcode component
  misc_feature (33)..(34): n is a, c, g, or t
  misc_feature (43)..(44): n is a, c, g, or t
  misc_feature (53)..(54): n is a, c, g, or t
tttttttaagcagtggtatcaacgcagagtacnntgtggaagnnctagagcanntttttttttttttttttttttttttttttt

SEQ ID NO: 7472 - DNA, 84 bp, Artificial
  Barcode component
  misc_feature (33)..(34): n is a, c, g, or t
  misc_feature (43)..(44): n is a, c, g, or t
  misc_feature (53)..(54): n is a, c, g, or t
tttttttaagcagtggtatcaacgcagagtacnntgtggaagnncttctagcnntttttttttttttttttttttttttttttt

SEQ ID NO: 7473 - DNA, 84 bp, Artificial
  Barcode component
  misc_feature (33)..(34): n is a, c, g, or t
  misc_feature (43)..(44): n is a, c, g, or t
  misc_feature (53)..(54): n is a, c, g, or t
tttttttaagcagtggtatcaacgcagagtacnntgtggaagnngagtaacgnntttttttttttttttttttttttttttttt

SEQ ID NO: 7474 - DNA, 84 bp, Artificial
  Barcode component
  misc_feature (33)..(34): n is a, c, g, or t
  misc_feature (43)..(44): n is a, c, g, or t
  misc_feature (53)..(54): n is a, c, g, or t
tttttttaagcagtggtatcaacgcagagtacnntgtggaagnnctaagaggnntttttttttttttttttttttttttttttt

SEQ ID NO: 7475 - DNA, 84 bp, Artificial
  Barcode component
  misc_feature (33)..(34): n is a, c, g, or t
  misc_feature (43)..(44): n is a, c, g, or t
  misc_feature (53)..(54): n is a, c, g, or t
tttttttaagcagtggtatcaacgcagagtacnntgtggaagnnacgtgtagnntttttttttttttttttttttttttttttt

SEQ ID NO: 7476 - DNA, 84 bp, Artificial
  Barcode component
  misc_feature (33)..(34): n is a, c, g, or t
  misc_feature (43)..(44): n is a, c, g, or t
  misc_feature (53)..(54): n is a, c, g, or t
tttttttaagcagtggtatcaacgcagagtacnntgtggaagnnactacaggnntttttttttttttttttttttttttttttt

SEQ ID NO: 7477 - DNA, 84 bp, Artificial
  Barcode component
  misc_feature (33)..(34): n is a, c, g, or t
  misc_feature (43)..(44): n is a, c, g, or t
  misc_feature (53)..(54): n is a, c, g, or t
tttttttaagcagtggtatcaacgcagagtacnntgtggaagnntacaggtcnntttttttttttttttttttttttttttttt

SEQ ID NO: 7478 - DNA, 84 bp, Artificial
  Barcode component
  misc_feature (33)..(34): n is a, c, g, or t
  misc_feature (43)..(44): n is a, c, g, or t
  misc_feature (53)..(54): n is a, c, g, or t
tttttttaagcagtggtatcaacgcagagtacnntgtggaagnnctcacatgnntttttttttttttttttttttttttttttt

SEQ ID NO: 7479 - DNA, 84 bp, Artificial
  Barcode component
  misc_feature (33)..(34): n is a, c, g, or t
  misc_feature (43)..(44): n is a, c, g, or t
  misc_feature (53)..(54): n is a, c, g, or t
tttttttaagcagtggtatcaacgcagagtacnntgtggaagnnactaggagnntttttttttttttttttttttttttttttt

SEQ ID NO: 7480 - DNA, 84 bp, Artificial
  Barcode component
  misc_feature (33)..(34): n is a, c, g, or t
  misc_feature (43)..(44): n is a, c, g, or t
  misc_feature (53)..(54): n is a, c, g, or t
tttttttaagcagtggtatcaacgcagagtacnntgtggaagnnccatagganntttttttttttttttttttttttttttttt

SEQ ID NO: 7481 - DNA, 84 bp, Artificial
  Barcode component
  misc_feature (33)..(34): n is a, c, g, or t
  misc_feature (43)..(44): n is a, c, g, or t
  misc_feature (53)..(54): n is a, c, g, or t
tttttttaagcagtggtatcaacgcagagtacnntgtggaagnnggagaatcnntttttttttttttttttttttttttttttt

SEQ ID NO: 7482 - DNA, 84 bp, Artificial
  Barcode component
  misc_feature (33)..(34): n is a, c, g, or t
  misc_feature (43)..(44): n is a, c, g, or t
  misc_feature (53)..(54): n is a, c, g, or t
tttttttaagcagtggtatcaacgcagagtacnntgtggaagnngccaagaanntttttttttttttttttttttttttttttt

SEQ ID NO: 7483 - DNA, 84 bp, Artificial
  Barcode component
  misc_feature (33)..(34): n is a, c, g, or t
  misc_feature (43)..(44): n is a, c, g, or t
  misc_feature (53)..(54): n is a, c, g, or t
tttttttaagcagtggtatcaacgcagagtacnntgtggaagnnaaggcaagnntttttttttttttttttttttttttttttt

SEQ ID NO: 7484 - DNA, 84 bp, Artificial
  Barcode component
  misc_feature (33)..(34): n is a, c, g, or t
  misc_feature (43)..(44): n is a, c, g, or t
  misc_feature (53)..(54): n is a, c, g, or t
tttttttaagcagtggtatcaacgcagagtacnntgtggaagnnaatgtcgcnntttttttttttttttttttttttttttttt

SEQ ID NO: 7485 - DNA, 84 bp, Artificial
  Barcode component
  misc_feature (33)..(34): n is a, c, g, or t
  misc_feature (43)..(44): n is a, c, g, or t
  misc_feature (53)..(54): n is a, c, g, or t
tttttttaagcagtggtatcaacgcagagtacnntgtggaagnnatggaaccnntttttttttttttttttttttttttttttt

SEQ ID NO: 7486 - DNA, 84 bp, Artificial
  Barcode component
  misc_feature (33)..(34): n is a, c, g, or t
  misc_feature (43)..(44): n is a, c, g, or t
  misc_feature (53)..(54): n is a, c, g, or t
tttttttaagcagtggtatcaacgcagagtacnntgtggaagnnagaggcatnntttttttttttttttttttttttttttttt

SEQ ID NO: 7487 - DNA, 84 bp, Artificial
  Barcode component
  misc_feature (33)..(34): n is a, c, g, or t
  misc_feature (43)..(44): n is a, c, g, or t
  misc_feature (53)..(54): n is a, c, g, or t
tttttttaagcagtggtatcaacgcagagtacnntgtggaagnntgcatagcnntttttttttttttttttttttttttttttt

SEQ ID NO: 7488 - DNA, 84 bp, Artificial
  Barcode component
  misc_feature (33)..(34): n is a, c, g, or t
  misc_feature (43)..(44): n is a, c, g, or t
  misc_feature (53)..(54): n is a, c, g, or t
tttttttaagcagtggtatcaacgcagagtacnntgtggaagnnctaacgganntttttttttttttttttttttttttttttt

SEQ ID NO: 7489 - DNA, 84 bp, Artificial
  Barcode component
  misc_feature (33)..(34): n is a, c, g, or t
  misc_feature (43)..(44): n is a, c, g, or t
  misc_feature (53)..(54): n is a, c, g, or t
tttttttaagcagtggtatcaacgcagagtacnntgtggaagnntatcgaggnntttttttttttttttttttttttttttttt

SEQ ID NO: 7490 - DNA, 84 bp, Artificial
  Barcode component
  misc_feature (33)..(34): n is a, c, g, or t
  misc_feature (43)..(44): n is a, c, g, or t
  misc_feature (53)..(54): n is a, c, g, or t
tttttttaagcagtggtatcaacgcagagtacnntgtggaagnncatagcctnntttttttttttttttttttttttttttttt

SEQ ID NO: 7491 - DNA, 84 bp, Artificial
  Barcode component
  misc_feature (33)..(34): n is a, c, g, or t
  misc_feature (43)..(44): n is a, c, g, or t
  misc_feature (53)..(54): n is a, c, g, or t
tttttttaagcagtggtatcaacgcagagtacnntgtggaagnnatcgagacnntttttttttttttttttttttttttttttt

SEQ ID NO: 7492 - DNA, 84 bp, Artificial
  Barcode component
  misc_feature (33)..(34): n is a, c, g, or t
  misc_feature (43)..(44): n is a, c, g, or t
  misc_feature (53)..(54): n is a, c, g, or t
tttttttaagcagtggtatcaacgcagagtacnntgtggaagnnggaagagtnntttttttttttttttttttttttttttttt

SEQ ID NO: 7493 - DNA, 84 bp, Artificial
  Barcode component
  misc_feature (33)..(34): n is a, c, g, or t
  misc_feature (43)..(44): n is a, c, g, or t
  misc_feature (53)..(54): n is a, c, g, or t
tttttttaagcagtggtatcaacgcagagtacnntgtggaagnnccaagtagnntttttttttttttttttttttttttttttt

SEQ ID NO: 7494 - DNA, 84 bp, Artificial
  Barcode component
  misc_feature (33)..(34): n is a, c, g, or t
  misc_feature (43)..(44): n is a, c, g, or t
  misc_feature (53)..(54): n is a, c, g, or t
tttttttaagcagtggtatcaacgcagagtacnntgtggaagnnctgaacagnntttttttttttttttttttttttttttttt

SEQ ID NO: 7495 - DNA, 84 bp, Artificial
  Barcode component
  misc_feature (33)..(34): n is a, c, g, or t
  misc_feature (43)..(44): n is a, c, g, or t
  misc_feature (53)..(54): n is a, c, g, or t
tttttttaagcagtggtatcaacgcagagtacnntgtggaagnngtaggttcnntttttttttttttttttttttttttttttt

SEQ ID NO: 7496 - DNA, 84 bp, Artificial
  Barcode component
  misc_feature (33)..(34): n is a, c, g, or t
  misc_feature (43)..(44): n is a, c, g, or t
  misc_feature (53)..(54): n is a, c, g, or t
tttttttaagcagtggtatcaacgcagagtacnntgtggaagnngtatggacnntttttttttttttttttttttttttttttt

SEQ ID NO: 7497 - DNA, 84 bp, Artificial
  Barcode component
  misc_feature (33)..(34): n is a, c, g, or t
  misc_feature (43)..(44): n is a, c, g, or t
  misc_feature (53)..(54): n is a, c, g, or t
tttttttaagcagtggtatcaacgcagagtacnntgtggaagnntcgcaacanntttttttttttttttttttttttttttttt

SEQ ID NO: 7498 - DNA, 84 bp, Artificial
  Barcode component
  misc_feature (33)..(34): n is a, c, g, or t
  misc_feature (43)..(44): n is a, c, g, or t
  misc_feature (53)..(54): n is a, c, g, or t
tttttttaagcagtggtatcaacgcagagtacnntgtggaagnnccgctaatnntttttttttttttttttttttttttttttt

SEQ ID NO: 7499 - DNA, 84 bp, Artificial
  Barcode component
  misc_feature (33)..(34): n is a, c, g, or t
  misc_feature (43)..(44): n is a, c, g, or t
  misc_feature (53)..(54): n is a, c, g, or t
tttttttaagcagtggtatcaacgcagagtacnntgtggaagnngattcgcanntttttttttttttttttttttttttttttt

SEQ ID NO: 7500 - DNA, 84 bp, Artificial
  Barcode component
  misc_feature (33)..(34): n is a, c, g, or t
  misc_feature (43)..(44): n is a, c, g, or t
  misc_feature (53)..(54): n is a, c, g, or t
tttttttaagcagtggtatcaacgcagagtacnntgtggaagnncgatggaanntttttttttttttttttttttttttttttt

SEQ ID NO: 7501 - DNA, 84 bp, Artificial
  Barcode component
  misc_feature (33)..(34): n is a, c, g, or t
  misc_feature (43)..(44): n is a, c, g, or t
  misc_feature (53)..(54): n is a, c, g, or t
tttttttaagcagtggtatcaacgcagagtacnntgtggaagnnagcaagganntttttttttttttttttttttttttttttt

SEQ ID NO: 7502 - DNA, 84 bp, Artificial
  Barcode component
  misc_feature (33)..(34): n is a, c, g, or t
  misc_feature (43)..(44): n is a, c, g, or t
  misc_feature (53)..(54): n is a, c, g, or t
tttttttaagcagtggtatcaacgcagagtacnntgtggaagnncgtagcaanntttttttttttttttttttttttttttttt

SEQ ID NO: 7503 - DNA, 84 bp, Artificial
  Barcode component
  misc_feature (33)..(34): n is a, c, g, or t
  misc_feature (43)..(44): n is a, c, g, or t
  misc_feature (53)..(54): n is a, c, g, or t
tttttttaagcagtggtatcaacgcagagtacnntgtggaagnntggcagtanntttttttttttttttttttttttttttttt

SEQ ID NO: 7504 - DNA, 84 bp, Artificial
  Barcode component
  misc_feature (33)..(34): n is a, c, g, or t
  misc_feature (43)..(44): n is a, c, g, or t
  misc_feature (53)..(54): n is a, c, g, or t
tttttttaagcagtggtatcaacgcagagtacnntgtggaagnncggtagttnntttttttttttttttttttttttttttttt

SEQ ID NO: 7505 - DNA, 84 bp, Artificial
  Barcode component
  misc_feature (33)..(34): n is a, c, g, or t
  misc_feature (43)..(44): n is a, c, g, or t
  misc_feature (53)..(54): n is a, c, g, or t
tttttttaagcagtggtatcaacgcagagtacnntgtggaagnntgacttcgnntttttttttttttttttttttttttttttt

SEQ ID NO: 7506 - DNA, 84 bp, Artificial
  Barcode component
  misc_feature (33)..(34): n is a, c, g, or t
  misc_feature (43)..(44): n is a, c, g, or t
  misc_feature (53)..(54): n is a, c, g, or t
tttttttaagcagtggtatcaacgcagagtacnntgtggaagnngagtgcaanntttttttttttttttttttttttttttttt

SEQ ID NO: 7507 - DNA, 84 bp, Artificial
  Barcode component
  misc_feature (33)..(34): n is a, c, g, or t
  misc_feature (43)..(44): n is a, c, g, or t
  misc_feature (53)..(54): n is a, c, g, or t
tttttttaagcagtggtatcaacgcagagtacnntgtggaagnnacggtaacnntttttttttttttttttttttttttttttt

SEQ ID NO: 7508 - DNA, 84 bp, Artificial
  Barcode component
  misc_feature (33)..(34): n is a, c, g, or t
  misc_feature (43)..(44): n is a, c, g, or t
  misc_feature (53)..(54): n is a, c, g, or t
tttttttaagcagtggtatcaacgcagagtacnntgtggaagnnaagtggtgnntttttttttttttttttttttttttttttt

SEQ ID NO: 7509 - DNA, 84 bp, Artificial
  Barcode component
  misc_feature (33)..(34): n is a, c, g, or t
  misc_feature (43)..(44): n is a, c, g, or t
  misc_feature (53)..(54): n is a, c, g, or t
tttttttaagcagtggtatcaacgcagagtacnntgtggaagnnggagacaanntttttttttttttttttttttttttttttt

SEQ ID NO: 7510 - DNA, 84 bp, Artificial
  Barcode component
  misc_feature (33)..(34): n is a, c, g, or t
  misc_feature (43)..(44): n is a, c, g, or t
  misc_feature (53)..(54): n is a, c, g, or t
tttttttaagcagtggtatcaacgcagagtacnntgtggaagnntcaaggacnntttttttttttttttttttttttttttttt

SEQ ID NO: 7511 - DNA, 84 bp, Artificial
  Barcode component
  misc_feature (33)..(34): n is a, c, g, or t
  misc_feature (43)..(44): n is a, c, g, or t
  misc_feature (53)..(54): n is a, c, g, or t
tttttttaagcagtggtatcaacgcagagtacnntgtggaagnnaagagagcnntttttttttttttttttttttttttttttt

SEQ ID NO: 7512 - DNA, 84 bp, Artificial
  Barcode component
  misc_feature (33)..(34): n is a, c, g, or t
  misc_feature (43)..(44): n is a, c, g, or t
  misc_feature (53)..(54): n is a, c, g, or t
tttttttaagcagtggtatcaacgcagagtacnntgtggaagnncgagagatnntttttttttttttttttttttttttttttt

SEQ ID NO: 7513 - DNA, 84 bp, Artificial
  Barcode component
  misc_feature (33)..(34): n is a, c, g, or t
  misc_feature (43)..(44): n is a, c, g, or t
  misc_feature (53)..(54): n is a, c, g, or t
tttttttaagcagtggtatcaacgcagagtacnntgtggaagnnacagatggnntttttttttttttttttttttttttttttt

SEQ ID NO: 7514 - DNA, 84 bp, Artificial
  Barcode component
  misc_feature (33)..(34): n is a, c, g, or t
  misc_feature (43)..(44): n is a, c, g, or t
  misc_feature (53)..(54): n is a, c, g, or t
tttttttaagcagtggtatcaacgcagagtacnntgtggaagnnaggagtcanntttttttttttttttttttttttttttttt

SEQ ID NO: 7515 - DNA, 84 bp, Artificial
  Barcode component
  misc_feature (33)..(34): n is a, c, g, or t
  misc_feature (43)..(44): n is a, c, g, or t
  misc_feature (53)..(54): n is a, c, g, or t
tttttttaagcagtggtatcaacgcagagtacnntgtggaagnncgtgttacnntttttttttttttttttttttttttttttt

SEQ ID NO: 7516 - DNA, 84 bp, Artificial
  Barcode component
  misc_feature (33)..(34): n is a, c, g, or t
  misc_feature (43)..(44): n is a, c, g, or t
  misc_feature (53)..(54): n is a, c, g, or t
tttttttaagcagtggtatcaacgcagagtacnntgtggaagnntagtgtgcnntttttttttttttttttttttttttttttt

SEQ ID NO: 7517 - DNA, 84 bp, Artificial
  Barcode component
  misc_feature (33)..(34): n is a, c, g, or t
  misc_feature (43)..(44): n is a, c, g, or t
  misc_feature (53)..(54): n is a, c, g, or t
tttttttaagcagtggtatcaacgcagagtacnntgtggaagnnctcatgacnntttttttttttttttttttttttttttttt

SEQ ID NO: 7518 - DNA, 84 bp, Artificial
  Barcode component
  misc_feature (33)..(34): n is a, c, g, or t
  misc_feature (43)..(44): n is a, c, g, or t
  misc_feature (53)..(54): n is a, c, g, or t
tttttttaagcagtggtatcaacgcagagtacnntgtggaagnngtatccagnntttttttttttttttttttttttttttttt

SEQ ID NO: 7519 - DNA, 84 bp, Artificial
  Barcode component
  misc_feature (33)..(34): n is a, c, g, or t
  misc_feature (43)..(44): n is a, c, g, or t
  misc_feature (53)..(54): n is a, c, g, or t
tttttttaagcagtggtatcaacgcagagtacnntgtggaagnnacgcctatnntttttttttttttttttttttttttttttt

SEQ ID NO: 7520 - DNA, 84 bp, Artificial
  Barcode component
  misc_feature (33)..(34): n is a, c, g, or t
  misc_feature (43)..(44): n is a, c, g, or t
  misc_feature (53)..(54): n is a, c, g, or t
tttttttaagcagtggtatcaacgcagagtacnntgtggaagnnaacgacctnntttttttttttttttttttttttttttttt

SEQ ID NO: 7521 - DNA, 84 bp, Artificial
  Barcode component
  misc_feature (33)..(34): n is a, c, g, or t
  misc_feature (43)..(44): n is a, c, g, or t
  misc_feature (53)..(54): n is a, c, g, or t
tttttttaagcagtggtatcaacgcagagtacnntgtggaagnnatcaggctnntttttttttttttttttttttttttttttt

SEQ ID NO: 7522 - DNA, 84 bp, Artificial
  Barcode component
  misc_feature (33)..(34): n is a, c, g, or t
  misc_feature (43)..(44): n is a, c, g, or t
  misc_feature (53)..(54): n is a, c, g, or t
tttttttaagcagtggtatcaacgcagagtacnntgtggaagnncaagttcgnntttttttttttttttttttttttttttttt

SEQ ID NO: 7523 - DNA, 84 bp, Artificial
  Barcode component
  misc_feature (33)..(34): n is a, c, g, or t
  misc_feature (43)..(44): n is a, c, g, or t
  misc_feature (53)..(54): n is a, c, g, or t
tttttttaagcagtggtatcaacgcagagtacnntgtggaagnntagccaganntttttttttttttttttttttttttttttt

SEQ ID NO: 7524 - DNA, 84 bp, Artificial
  Barcode component
  misc_feature (33)..(34): n is a, c, g, or t
  misc_feature (43)..(44): n is a, c, g, or t
  misc_feature (53)..(54): n is a, c, g, or t
tttttttaagcagtggtatcaacgcagagtacnntgtggaagnncaatcacgnntttttttttttttttttttttttttttttt

SEQ ID NO: 7525 - DNA, 84 bp, Artificial
  Barcode component
  misc_feature (33)..(34): n is a, c, g, or t
  misc_feature (43)..(44): n is a, c, g, or t
  misc_feature (53)..(54): n is a, c, g, or t
tttttttaagcagtggtatcaacgcagagtacnntgtggaagnngcaacaagnntttttttttttttttttttttttttttttt

SEQ ID NO: 7526 - DNA, 84 bp, Artificial
  Barcode component
  misc_feature (33)..(34): n is a, c, g, or t
  misc_feature (43)..(44): n is a, c, g, or t
  misc_feature (53)..(54): n is a, c, g, or t
tttttttaagcagtggtatcaacgcagagtacnntgtggaagnncacgacaanntttttttttttttttttttttttttttttt

SEQ ID NO: 7527 - DNA, 84 bp, Artificial
  Barcode component
  misc_feature (33)..(34): n is a, c, g, or t
  misc_feature (43)..(44): n is a, c, g, or t
  misc_feature (53)..(54): n is a, c, g, or t
tttttttaagcagtggtatcaacgcagagtacnntgtggaagnntacggaganntttttttttttttttttttttttttttttt

SEQ ID NO: 7528 - DNA, 84 bp, Artificial
  Barcode component
  misc_feature (33)..(34): n is a, c, g, or t
  misc_feature (43)..(44): n is a, c, g, or t
  misc_feature (53)..(54): n is a, c, g, or t
tttttttaagcagtggtatcaacgcagagtacnntgtggaagnncgacaaganntttttttttttttttttttttttttttttt

SEQ ID NO: 7529 - DNA, 84 bp, Artificial
  Barcode component
  misc_feature (33)..(34): n is a, c, g, or t
  misc_feature (43)..(44): n is a, c, g, or t
  misc_feature (53)..(54): n is a, c, g, or t
tttttttaagcagtggtatcaacgcagagtacnntgtggaagnncgaagtganntttttttttttttttttttttttttttttt

SEQ ID NO: 7530 - DNA, 84 bp, Artificial
  Barcode component
  misc_feature (33)..(34): n is a, c, g, or t
  misc_feature (43)..(44): n is a, c, g, or t
  misc_feature (53)..(54): n is a, c, g, or t
tttttttaagcagtggtatcaacgcagagtacnntgtggaagnnagctggtanntttttttttttttttttttttttttttttt

SEQ ID NO: 7531 - DNA, 84 bp, Artificial
  Barcode component
  misc_feature (33)..(34): n is a, c, g, or t
  misc_feature (43)..(44): n is a, c, g, or t
  misc_feature (53)..(54): n is a, c, g, or t
tttttttaagcagtggtatcaacgcagagtacnntgtggaagnnaactaggcnntttttttttttttttttttttttttttttt

SEQ ID NO: 7532 - DNA, 84 bp, Artificial
  Barcode component
  misc_feature (33)..(34): n is a, c, g, or t
  misc_feature (43)..(44): n is a, c, g, or t
  misc_feature (53)..(54): n is a, c, g, or t
tttttttaagcagtggtatcaacgcagagtacnntgtggaagnncagcaagtnntttttttttttttttttttttttttttttt

SEQ ID NO: 7533 - DNA, 84 bp, Artificial
  Barcode component
  misc_feature (33)..(34): n is a, c, g, or t
  misc_feature (43)..(44): n is a, c, g, or t
  misc_feature (53)..(54): n is a, c, g, or t
tttttttaagcagtggtatcaacgcagagtacnntgtggaagnnacgaggtanntttttttttttttttttttttttttttttt

SEQ ID NO: 7534 - DNA, 84 bp, Artificial
  Barcode component
  misc_feature (33)..(34): n is a, c, g, or t
  misc_feature (43)..(44): n is a, c, g, or t
  misc_feature (53)..(54): n is a, c, g, or t
tttttttaagcagtggtatcaacgcagagtacnntgtggaagnncatcttccnntttttttttttttttttttttttttttttt

SEQ ID NO: 7535 - DNA, 84 bp, Artificial
  Barcode component
  misc_feature (33)..(34): n is a, c, g, or t
  misc_feature (43)..(44): n is a, c, g, or t
  misc_feature (53)..(54): n is a, c, g, or t
tttttttaagcagtggtatcaacgcagagtacnntgtggaagnncctgaatcnntttttttttttttttttttttttttttttt

SEQ ID NO: 7536 - DNA, 84 bp, Artificial
  Barcode component
  misc_feature (33)..(34): n is a, c, g, or t
  misc_feature (43)..(44): n is a, c, g, or t
  misc_feature (53)..(54): n is a, c, g, or t
tttttttaagcagtggtatcaacgcagagtacnntgtggaagnntgcagactnntttttttttttttttttttttttttttttt

SEQ ID NO: 7537 - DNA, 84 bp, Artificial
  Barcode component
  misc_feature (33)..(34): n is a, c, g, or t
  misc_feature (43)..(44): n is a, c, g, or t
  misc_feature (53)..(54): n is a, c, g, or t
tttttttaagcagtggtatcaacgcagagtacnntgtggaagnnagatgtggnntttttttttttttttttttttttttttttt

SEQ ID NO: 7538 - DNA, 84 bp, Artificial
  Barcode component
  misc_feature (33)..(34): n is a, c, g, or t
  misc_feature (43)..(44): n is a, c, g, or t
  misc_feature (53)..(54): n is a, c, g, or t
tttttttaagcagtggtatcaacgcagagtacnntgtggaagnnagttcgacnntttttttttttttttttttttttttttttt

SEQ ID NO: 7539 - DNA, 84 bp, Artificial
  Barcode component
  misc_feature (33)..(34): n is a, c, g, or t
  misc_feature (43)..(44): n is a, c, g, or t
  misc_feature (53)..(54): n is a, c, g, or t
tttttttaagcagtggtatcaacgcagagtacnntgtggaagnnacaacctcnntttttttttttttttttttttttttttttt

SEQ ID NO: 7540 - DNA, 84 bp, Artificial
  Barcode component
  misc_feature (33)..(34): n is a, c, g, or t
  misc_feature (43)..(44): n is a, c, g, or t
  misc_feature (53)..(54): n is a, c, g, or t
tttttttaagcagtggtatcaacgcagagtacnntgtggaagnncatggtagnntttttttttttttttttttttttttttttt

SEQ ID NO: 7541 - DNA, 84 bp, Artificial
  Barcode component
  misc_feature (33)..(34): n is a, c, g, or t
  misc_feature (43)..(44): n is a, c, g, or t
  misc_feature (53)..(54): n is a, c, g, or t
tttttttaagcagtggtatcaacgcagagtacnntgtggaagnncgtatctcnntttttttttttttttttttttttttttttt

SEQ ID NO: 7542 - DNA, 84 bp, Artificial
  Barcode component
  misc_feature (33)..(34): n is a, c, g, or t
  misc_feature (43)..(44): n is a, c, g, or t
  misc_feature (53)..(54): n is a, c, g, or t
tttttttaagcagtggtatcaacgcagagtacnntgtggaagnncctagttcnntttttttttttttttttttttttttttttt

SEQ ID NO: 7543 - DNA, 84 bp, Artificial
  Barcode component
  misc_feature (33)..(34): n is a, c, g, or t
  misc_feature (43)..(44): n is a, c, g, or t
  misc_feature (53)..(54): n is a, c, g, or t
tttttttaagcagtggtatcaacgcagagtacnntgtggaagnncaagagtcnntttttttttttttttttttttttttttttt

SEQ ID NO: 7544 - DNA, 84 bp, Artificial
  Barcode component
  misc_feature (33)..(34): n is a, c, g, or t
  misc_feature (43)..(44): n is a, c, g, or t
  misc_feature (53)..(54): n is a, c, g, or t
tttttttaagcagtggtatcaacgcagagtacnntcttgtggnnaatcggcanntttttttttttttttttttttttttttttt

SEQ ID NO: 7545 - DNA, 84 bp, Artificial
  Barcode component
  misc_feature (33)..(34): n is a, c, g, or t
  misc_feature (43)..(44): n is a, c, g, or t
  misc_feature (53)..(54): n is a, c, g, or t
tttttttaagcagtggtatcaacgcagagtacnntcttgtggnntacggcatnntttttttttttttttttttttttttttttt

SEQ ID NO: 7546 - DNA, 84 bp, Artificial
  Barcode component
  misc_feature (33)..(34): n is a, c, g, or t
  misc_feature (43)..(44): n is a, c, g, or t
  misc_feature (53)..(54): n is a, c, g, or t
tttttttaagcagtggtatcaacgcagagtacnntcttgtggnnttggatcgnntttttttttttttttttttttttttttttt

SEQ ID NO: 7547 - DNA, 84 bp, Artificial
  Barcode component
  misc_feature (33)..(34): n is a, c, g, or t
  misc_feature (43)..(44): n is a, c, g, or t
  misc_feature (53)..(54): n is a, c, g, or t
tttttttaagcagtggtatcaacgcagagtacnntcttgtggnntggaacganntttttttttttttttttttttttttttttt

SEQ ID NO: 7548 - DNA, 84 bp, Artificial
  Barcode component
  misc_feature (33)..(34): n is a, c, g, or t
  misc_feature (43)..(44): n is a, c, g, or t
  misc_feature (53)..(54): n is a, c, g, or t
tttttttaagcagtggtatcaacgcagagtacnntcttgtggnnggcaatcanntttttttttttttttttttttttttttttt

SEQ ID NO: 7549 - DNA, 84 bp, Artificial
  Barcode component
  misc_feature (33)..(34): n is a, c, g, or t
  misc_feature (43)..(44): n is a, c, g, or t
  misc_feature (53)..(54): n is a, c, g, or t
tttttttaagcagtggtatcaacgcagagtacnntcttgtggnngaatccganntttttttttttttttttttttttttttttt

SEQ ID NO: 7550 - DNA, 84 bp, Artificial
  Barcode component
  misc_feature (33)..(34): n is a, c, g, or t
  misc_feature (43)..(44): n is a, c, g, or t
  misc_feature (53)..(54): n is a, c, g, or t
tttttttaagcagtggtatcaacgcagagtacnntcttgtggnnttacggtgnntttttttttttttttttttttttttttttt

SEQ ID NO: 7551 - DNA, 84 bp, Artificial
  Barcode component
  misc_feature (33)..(34): n is a, c, g, or t
  misc_feature (43)..(44): n is a, c, g, or t
  misc_feature (53)..(54): n is a, c, g, or t
tttttttaagcagtggtatcaacgcagagtacnntcttgtggnncatatcggnntttttttttttttttttttttttttttttt

SEQ ID NO: 7552 - DNA, 84 bp, Artificial
  Barcode component
  misc_feature (33)..(34): n is a, c, g, or t
  misc_feature (43)..(44): n is a, c, g, or t
  misc_feature (53)..(54): n is a, c, g, or t
tttttttaagcagtggtatcaacgcagagtacnntcttgtggnncttcggtanntttttttttttttttttttttttttttttt

SEQ ID NO: 7553 - DNA, 84 bp, Artificial
  Barcode component
  misc_feature (33)..(34): n is a, c, g, or t
  misc_feature (43)..(44): n is a, c, g, or t
  misc_feature (53)..(54): n is a, c, g, or t
tttttttaagcagtggtatcaacgcagagtacnntcttgtggnntcctaacgnntttttttttttttttttttttttttttttt

SEQ ID NO: 7554 - DNA, 84 bp, Artificial
  Barcode component
  misc_feature (33)..(34): n is a, c, g, or t
  misc_feature (43)..(44): n is a, c, g, or t
  misc_feature (53)..(54): n is a, c, g, or t
tttttttaagcagtggtatcaacgcagagtacnntcttgtggnngtaagccanntttttttttttttttttttttttttttttt

SEQ ID NO: 7555 - DNA, 84 bp, Artificial
  Barcode component
  misc_feature (33)..(34): n is a, c, g, or t
  misc_feature (43)..(44): n is a, c, g, or t
  misc_feature (53)..(54): n is a, c, g, or t
tttttttaagcagtggtatcaacgcagagtacnntcttgtggnntaaggtggnntttttttttttttttttttttttttttttt

SEQ ID NO: 7556 - DNA, 84 bp, Artificial
  Barcode component
  misc_feature (33)..(34): n is a, c, g, or t
  misc_feature (43)..(44): n is a, c, g, or t
  misc_feature (53)..(54): n is a, c, g, or t
tttttttaagcagtggtatcaacgcagagtacnntcttgtggnnggtaagctnntttttttttttttttttttttttttttttt

SEQ ID NO: 7557 - DNA, 84 bp, Artificial
  Barcode component
  misc_feature (33)..(34): n is a, c, g, or t
  misc_feature (43)..(44): n is a, c, g, or t
  misc_feature (53)..(54): n is a, c, g, or t
tttttttaagcagtggtatcaacgcagagtacnntcttgtggnntgtgtcganntttttttttttttttttttttttttttttt

SEQ ID NO: 7558 - DNA, 84 bp, Artificial
  Barcode component
  misc_feature (33)..(34): n is a, c, g, or t
  misc_feature (43)..(44): n is a, c, g, or t
  misc_feature (53)..(54): n is a, c, g, or t
tttttttaagcagtggtatcaacgcagagtacnntcttgtggnngagcatganntttttttttttttttttttttttttttttt

SEQ ID NO: 7559 - DNA, 84 bp, Artificial
  Barcode component
  misc_feature (33)..(34): n is a, c, g, or t
  misc_feature (43)..(44): n is a, c, g, or t
  misc_feature (53)..(54): n is a, c, g, or t
tttttttaagcagtggtatcaacgcagagtacnntcttgtggnntcgaagtcnntttttttttttttttttttttttttttttt

SEQ ID NO: 7560 - DNA, 84 bp, Artificial
  Barcode component
  misc_feature (33)..(34): n is a, c, g, or t
  misc_feature (43)..(44): n is a, c, g, or t
  misc_feature (53)..(54): n is a, c, g, or t
tttttttaagcagtggtatcaacgcagagtacnntcttgtggnnggtgaacanntttttttttttttttttttttttttttttt

SEQ ID NO: 7561 - DNA, 84 bp, Artificial
  Barcode component
  misc_feature (33)..(34): n is a, c, g, or t
  misc_feature (43)..(44): n is a, c, g, or t
  misc_feature (53)..(54): n is a, c, g, or t
tttttttaagcagtggtatcaacgcagagtacnntcttgtggnnacatgcacnntttttttttttttttttttttttttttttt

SEQ ID NO: 7562 - DNA, 84 bp, Artificial
  Barcode component
  misc_feature (33)..(34): n is a, c, g, or t
  misc_feature (43)..(44): n is a, c, g, or t
  misc_feature (53)..(54): n is a, c, g, or t
tttttttaagcagtggtatcaacgcagagtacnntcttgtggnnccaacagtnntttttttttttttttttttttttttttttt

SEQ ID NO: 7563 - DNA, 84 bp, Artificial
  Barcode component
  misc_feature (33)..(34): n is a, c, g, or t
  misc_feature (43)..(44): n is a, c, g, or t
  misc_feature (53)..(54): n is a, c, g, or t
tttttttaagcagtggtatcaacgcagagtacnntcttgtggnnagaacagcnntttttttttttttttttttttttttttttt

SEQ ID NO: 7564 - DNA, 84 bp, Artificial
  Barcode component
  misc_feature (33)..(34): n is a, c, g, or t
  misc_feature (43)..(44): n is a, c, g, or t
  misc_feature (53)..(54): n is a, c, g, or t
tttttttaagcagtggtatcaacgcagagtacnntcttgtggnngaacacgtnntttttttttttttttttttttttttttttt

SEQ ID NO: 7565 - DNA, 84 bp, Artificial
  Barcode component
  misc_feature (33)..(34): n is a, c, g, or t
  misc_feature (43)..(44): n is a, c, g, or t
  misc_feature (53)..(54): n is a, c, g, or t
tttttttaagcagtggtatcaacgcagagtacnntcttgtggnnggtcttcanntttttttttttttttttttttttttttttt

SEQ ID NO: 7566 - DNA, 84 bp, Artificial
  Barcode component
  misc_feature (33)..(34): n is a, c, g, or t
  misc_feature (43)..(44): n is a, c, g, or t
  misc_feature (53)..(54): n is a, c, g, or t
tttttttaagcagtggtatcaacgcagagtacnntcttgtggnnaggttcagnntttttttttttttttttttttttttttttt

SEQ ID NO: 7567 - DNA, 84 bp, Artificial
  Barcode component
  misc_feature (33)..(34): n is a, c, g, or t
  misc_feature (43)..(44): n is a, c, g, or t
  misc_feature (53)..(54): n is a, c, g, or t
tttttttaagcagtggtatcaacgcagagtacnntcttgtggnnctagagcanntttttttttttttttttttttttttttttt

SEQ ID NO: 7568 - DNA, 84 bp, Artificial
  Barcode component
  misc_feature (33)..(34): n is a, c, g, or t
  misc_feature (43)..(44): n is a, c, g, or t
  misc_feature (53)..(54): n is a, c, g, or t
tttttttaagcagtggtatcaacgcagagtacnntcttgtggnncttctagcnntttttttttttttttttttttttttttttt

SEQ ID NO: 7569 - DNA, 84 bp, Artificial
  Barcode component
  misc_feature (33)..(34): n is a, c, g, or t
  misc_feature (43)..(44): n is a, c, g, or t
  misc_feature (53)..(54): n is a, c, g, or t
tttttttaagcagtggtatcaacgcagagtacnntcttgtggnngagtaacgnntttttttttttttttttttttttttttttt

SEQ ID NO: 7570 - DNA, 84 bp, Artificial
  Barcode component
  misc_feature (33)..(34): n is a, c, g, or t
  misc_feature (43)..(44): n is a, c, g, or t
  misc_feature (53)..(54): n is a, c, g, or t
tttttttaagcagtggtatcaacgcagagtacnntcttgtggnnctaagaggnntttttttttttttttttttttttttttttt

SEQ ID NO: 7571 - DNA, 84 bp, Artificial
  Barcode component
  misc_feature (33)..(34): n is a, c, g, or t
  misc_feature (43)..(44): n is a, c, g, or t
  misc_feature (53)..(54): n is a, c, g, or t
tttttttaagcagtggtatcaacgcagagtacnntcttgtggnnacgtgtagnntttttttttttttttttttttttttttttt

SEQ ID NO: 7572 - DNA, 84 bp, Artificial
  Barcode component
  misc_feature (33)..(34): n is a, c, g, or t
  misc_feature (43)..(44): n is a, c, g, or t
  misc_feature (53)..(54): n is a, c, g, or t
tttttttaagcagtggtatcaacgcagagtacnntcttgtggnnactacaggnntttttttttttttttttttttttttttttt

SEQ ID NO: 7573 - DNA, 84 bp, Artificial
  Barcode component
  misc_feature (33)..(34): n is a, c, g, or t
  misc_feature (43)..(44): n is a, c, g, or t
  misc_feature (53)..(54): n is a, c, g, or t
tttttttaagcagtggtatcaacgcagagtacnntcttgtggnntacaggtcnntttttttttttttttttttttttttttttt

SEQ ID NO: 7574 - DNA, 84 bp, Artificial
  Barcode component
  misc_feature (33)..(34): n is a, c, g, or t
  misc_feature (43)..(44): n is a, c, g, or t
  misc_feature (53)..(54): n is a, c, g, or t
tttttttaagcagtggtatcaacgcagagtacnntcttgtggnnctcacatgnntttttttttttttttttttttttttttttt

SEQ ID NO: 7575 - DNA, 84 bp, Artificial
  Barcode component
  misc_feature (33)..(34): n is a, c, g, or t
  misc_feature (43)..(44): n is a, c, g, or t
  misc_feature (53)..(54): n is a, c, g, or t
tttttttaagcagtggtatcaacgcagagtacnntcttgtggnnactaggagnntttttttttttttttttttttttttttttt

SEQ ID NO: 7576 - DNA, 84 bp, Artificial
  Barcode component
  misc_feature (33)..(34): n is a, c, g, or t
  misc_feature (43)..(44): n is a, c, g, or t
  misc_feature (53)..(54): n is a, c, g, or t
tttttttaagcagtggtatcaacgcagagtacnntcttgtggnnccatagganntttttttttttttttttttttttttttttt

SEQ ID NO: 7577 - DNA, 84 bp, Artificial
  Barcode component
  misc_feature (33)..(34): n is a, c, g, or t
  misc_feature (43)..(44): n is a, c, g, or t
  misc_feature (53)..(54): n is a, c, g, or t
tttttttaagcagtggtatcaacgcagagtacnntcttgtggnnggagaatcnntttttttttttttttttttttttttttttt

SEQ ID NO: 7578 - DNA, 84 bp, Artificial
  Barcode component
  misc_feature (33)..(34): n is a, c, g, or t
  misc_feature (43)..(44): n is a, c, g, or t
  misc_feature (53)..(54): n is a, c, g, or t
tttttttaagcagtggtatcaacgcagagtacnntcttgtggnngccaagaanntttttttttttttttttttttttttttttt

SEQ ID NO: 7579 - DNA, 84 bp, Artificial
  Barcode component
  misc_feature (33)..(34): n is a, c, g, or t
  misc_feature (43)..(44): n is a, c, g, or t
  misc_feature (53)..(54): n is a, c, g, or t
tttttttaagcagtggtatcaacgcagagtacnntcttgtggnnaaggcaagnntttttttttttttttttttttttttttttt

SEQ ID NO: 7580 - DNA, 84 bp, Artificial
  Barcode component
  misc_feature (33)..(34): n is a, c, g, or t
  misc_feature (43)..(44): n is a, c, g, or t
  misc_feature (53)..(54): n is a, c, g, or t
tttttttaagcagtggtatcaacgcagagtacnntcttgtggnnaatgtcgcnntttttttttttttttttttttttttttttt

SEQ ID NO: 7581 - DNA, 84 bp, Artificial
  Barcode component
  misc_feature (33)..(34): n is a, c, g, or t
  misc_feature (43)..(44): n is a, c, g, or t
  misc_feature (53)..(54): n is a, c, g, or t
tttttttaagcagtggtatcaacgcagagtacnntcttgtggnnatggaaccnntttttttttttttttttttttttttttttt

SEQ ID NO: 7582 - DNA, 84 bp, Artificial
  Barcode component
  misc_feature (33)..(34): n is a, c, g, or t
  misc_feature (43)..(44): n is a, c, g, or t
  misc_feature (53)..(54): n is a, c, g, or t
tttttttaagcagtggtatcaacgcagagtacnntcttgtggnnagaggcatnntttttttttttttttttttttttttttttt

SEQ ID NO: 7583 - DNA, 84 bp, Artificial
  Barcode component
  misc_feature (33)..(34): n is a, c, g, or t
  misc_feature (43)..(44): n is a, c, g, or t
  misc_feature (53)..(54): n is a, c, g, or t
tttttttaagcagtggtatcaacgcagagtacnntcttgtggnntgcatagcnntttttttttttttttttttttttttttttt

SEQ ID NO: 7584 - DNA, 84 bp, Artificial
  Barcode component
  misc_feature (33)..(34): n is a, c, g, or t
  misc_feature (43)..(44): n is a, c, g, or t
  misc_feature (53)..(54): n is a, c, g, or t
tttttttaagcagtggtatcaacgcagagtacnntcttgtggnnctaacgganntttttttttttttttttttttttttttttt

SEQ ID NO: 7585 - DNA, 84 bp, Artificial
  Barcode component
  misc_feature (33)..(34): n is a, c, g, or t
  misc_feature (43)..(44): n is a, c, g, or t
  misc_feature (53)..(54): n is a, c, g, or t
tttttttaagcagtggtatcaacgcagagtacnntcttgtggnntatcgaggnntttttttttttttttttttttttttttttt

SEQ ID NO: 7586 - DNA, 84 bp, Artificial
  Barcode component
  misc_feature (33)..(34): n is a, c, g, or t
  misc_feature (43)..(44): n is a, c, g, or t
  misc_feature (53)..(54): n is a, c, g, or t
tttttttaagcagtggtatcaacgcagagtacnntcttgtggnncatagcctnntttttttttttttttttttttttttttttt

SEQ ID NO: 7587 - DNA, 84 bp, Artificial
  Barcode component
  misc_feature (33)..(34): n is a, c, g, or t
  misc_feature (43)..(44): n is a, c, g, or t
  misc_feature (53)..(54): n is a, c, g, or t
tttttttaagcagtggtatcaacgcagagtacnntcttgtggnnatcgagacnntttttttttttttttttttttttttttttt

SEQ ID NO: 7588 - DNA, 84 bp, Artificial
  Barcode component
  misc_feature (33)..(34): n is a, c, g, or t
  misc_feature (43)..(44): n is a, c, g, or t
  misc_feature (53)..(54): n is a, c, g, or t
tttttttaagcagtggtatcaacgcagagtacnntcttgtggnnggaagagtnntttttttttttttttttttttttttttttt

SEQ ID NO: 7589 - DNA, 84 bp, Artificial
  Barcode component
  misc_feature (33)..(34): n is a, c, g, or t
  misc_feature (43)..(44): n is a, c, g, or t
  misc_feature (53)..(54): n is a, c, g, or t
tttttttaagcagtggtatcaacgcagagtacnntcttgtggnnccaagtagnntttttttttttttttttttttttttttttt

SEQ ID NO: 7590 - DNA, 84 bp, Artificial
  Barcode component
  misc_feature (33)..(34): n is a, c, g, or t
  misc_feature (43)..(44): n is a, c, g, or t
  misc_feature (53)..(54): n is a, c, g, or t
tttttttaagcagtggtatcaacgcagagtacnntcttgtggnnctgaacagnntttttttttttttttttttttttttttttt

SEQ ID NO: 7591 - DNA, 84 bp, Artificial
  Barcode component
  misc_feature (33)..(34): n is a, c, g, or t
  misc_feature (43)..(44): n is a, c, g, or t
  misc_feature (53)..(54): n is a, c, g, or t
tttttttaagcagtggtatcaacgcagagtacnntcttgtggnngtaggttcnntttttttttttttttttttttttttttttt

SEQ ID NO: 7592 - DNA, 84 bp, Artificial
  Barcode component
  misc_feature (33)..(34): n is a, c, g, or t
  misc_feature (43)..(44): n is a, c, g, or t
  misc_feature (53)..(54): n is a, c, g, or t
tttttttaagcagtggtatcaacgcagagtacnntcttgtggnngtatggacnntttttttttttttttttttttttttttttt

SEQ ID NO: 7593 - DNA, 84 bp, Artificial
  Barcode component
  misc_feature (33)..(34): n is a, c, g, or t
  misc_feature (43)..(44): n is a, c, g, or t
  misc_feature (53)..(54): n is a, c, g, or t
tttttttaagcagtggtatcaacgcagagtacnntcttgtggnntcgcaacanntttttttttttttttttttttttttttttt

SEQ ID NO: 7594 - DNA, 84 bp, Artificial
  Barcode component
  misc_feature (33)..(34): n is a, c, g, or t
  misc_feature (43)..(44): n is a, c, g, or t
  misc_feature (53)..(54): n is a, c, g, or t
tttttttaagcagtggtatcaacgcagagtacnntcttgtggnnccgctaatnntttttttttttttttttttttttttttttt

SEQ ID NO: 7595 - DNA, 84 bp, Artificial
  Barcode component
  misc_feature (33)..(34): n is a, c, g, or t
  misc_feature (43)..(44): n is a, c, g, or t
  misc_feature (53)..(54): n is a, c, g, or t
tttttttaagcagtggtatcaacgcagagtacnntcttgtggnngattcgcanntttttttttttttttttttttttttttttt

SEQ ID NO: 7596 - DNA, 84 bp, Artificial
  Barcode component
  misc_feature (33)..(34): n is a, c, g, or t
  misc_feature (43)..(44): n is a, c, g, or t
  misc_feature (53)..(54): n is a, c, g, or t
tttttttaagcagtggtatcaacgcagagtacnntcttgtggnncgatggaanntttttttttttttttttttttttttttttt

SEQ ID NO: 7597 - DNA, 84 bp, Artificial
  Barcode component
  misc_feature (33)..(34): n is a, c, g, or t
  misc_feature (43)..(44): n is a, c, g, or t
  misc_feature (53)..(54): n is a, c, g, or t
tttttttaagcagtggtatcaacgcagagtacnntcttgtggnnagcaagganntttttttttttttttttttttttttttttt

SEQ ID NO: 7598 - DNA, 84 bp, Artificial
  Barcode component
  misc_feature (33)..(34): n is a, c, g, or t
  misc_feature (43)..(44): n is a, c, g, or t
  misc_feature (53)..(54): n is a, c, g, or t
tttttttaagcagtggtatcaacgcagagtacnntcttgtggnncgtagcaanntttttttttttttttttttttttttttttt

SEQ ID NO: 7599 - DNA, 84 bp, Artificial
  Barcode component
  misc_feature (33)..(34): n is a, c, g, or t
  misc_feature (43)..(44): n is a, c, g, or t
  misc_feature (53)..(54): n is a, c, g, or t
tttttttaagcagtggtatcaacgcagagtacnntcttgtggnntggcagtanntttttttttttttttttttttttttttttt

SEQ ID NO: 7600 - DNA, 84 bp, Artificial
  Barcode component
  misc_feature (33)..(34): n is a, c, g, or t
  misc_feature (43)..(44): n is a, c, g, or t
  misc_feature (53)..(54): n is a, c, g, or t
tttttttaagcagtggtatcaacgcagagtacnntcttgtggnncggtagttnntttttttttttttttttttttttttttttt

SEQ ID NO: 7601 - DNA, 84 bp, Artificial
  Barcode component
  misc_feature (33)..(34): n is a, c, g, or t
  misc_feature (43)..(44): n is a, c, g, or t
  misc_feature (53)..(54): n is a, c, g, or t
tttttttaagcagtggtatcaacgcagagtacnntcttgtggnntgacttcgnntttttttttttttttttttttttttttttt

SEQ ID NO: 7602 - DNA, 84 bp, Artificial
  Barcode component
  misc_feature (33)..(34): n is a, c, g, or t
  misc_feature (43)..(44): n is a, c, g, or t
  misc_feature (53)..(54): n is a, c, g, or t
tttttttaagcagtggtatcaacgcagagtacnntcttgtggnngagtgcaanntttttttttttttttttttttttttttttt

SEQ ID NO: 7603 - DNA, 84 bp, Artificial
  Barcode component
  misc_feature (33)..(34): n is a, c, g, or t
  misc_feature (43)..(44): n is a, c, g, or t
  misc_feature (53)..(54): n is a, c, g, or t
tttttttaagcagtggtatcaacgcagagtacnntcttgtggnnacggtaacnntttttttttttttttttttttttttttttt

SEQ ID NO: 7604 - DNA, 84 bp, Artificial
  Barcode component
  misc_feature (33)..(34): n is a, c, g, or t
  misc_feature (43)..(44): n is a, c, g, or t
  misc_feature (53)..(54): n is a, c, g, or t
tttttttaagcagtggtatcaacgcagagtacnntcttgtggnnaagtggtgnntttttttttttttttttttttttttttttt

SEQ ID NO: 7605 - DNA, 84 bp, Artificial
  Barcode component
  misc_feature (33)..(34): n is a, c, g, or t
  misc_feature (43)..(44): n is a, c, g, or t
  misc_feature (53)..(54): n is a, c, g, or t
tttttttaagcagtggtatcaacgcagagtacnntcttgtggnnggagacaanntttttttttttttttttttttttttttttt

SEQ ID NO: 7606 - DNA, 84 bp, Artificial
  Barcode component
  misc_feature (33)..(34): n is a, c, g, or t
  misc_feature (43)..(44): n is a, c, g, or t
  misc_feature (53)..(54): n is a, c, g, or t
tttttttaagcagtggtatcaacgcagagtacnntcttgtggnntcaaggacnntttttttttttttttttttttttttttttt

SEQ ID NO: 7607 - DNA, 84 bp, Artificial
  Barcode component
  misc_feature (33)..(34): n is a, c, g, or t
  misc_feature (43)..(44): n is a, c, g, or t
  misc_feature (53)..(54): n is a, c, g, or t
tttttttaagcagtggtatcaacgcagagtacnntcttgtggnnaagagagcnntttttttttttttttttttttttttttttt

SEQ ID NO: 7608 - DNA, 84 bp, Artificial
  Barcode component
  misc_feature (33)..(34): n is a, c, g, or t
  misc_feature (43)..(44): n is a, c, g, or t
  misc_feature (53)..(54): n is a, c, g, or t
tttttttaagcagtggtatcaacgcagagtacnntcttgtggnncgagagatnntttttttttttttttttttttttttttttt

SEQ ID NO: 7609 - DNA, 84 bp, Artificial
  Barcode component
  misc_feature (33)..(34): n is a, c, g, or t
  misc_feature (43)..(44): n is a, c, g, or t
  misc_feature (53)..(54): n is a, c, g, or t
tttttttaagcagtggtatcaacgcagagtacnntcttgtggnnacagatggnntttttttttttttttttttttttttttttt

SEQ ID NO: 7610 - DNA, 84 bp, Artificial
  Barcode component
  misc_feature (33)..(34): n is a, c, g, or t
  misc_feature (43)..(44): n is a, c, g, or t
  misc_feature (53)..(54): n is a, c, g, or t
tttttttaagcagtggtatcaacgcagagtacnntcttgtggnnaggagtcanntttttttttttttttttttttttttttttt

SEQ ID NO: 7611 - DNA, 84 bp, Artificial
  Barcode component
  misc_feature (33)..(34): n is a, c, g, or t
  misc_feature (43)..(44): n is a, c, g, or t
  misc_feature (53)..(54): n is a, c, g, or t
tttttttaagcagtggtatcaacgcagagtacnntcttgtggnncgtgttacnntttttttttttttttttttttttttttttt

SEQ ID NO: 7612 - DNA, 84 bp, Artificial
  Barcode component
  misc_feature (33)..(34): n is a, c, g, or t
  misc_feature (43)..(44): n is a, c, g, or t
  misc_feature (53)..(54): n is a, c, g, or t
tttttttaagcagtggtatcaacgcagagtacnntcttgtggnntagtgtgcnntttttttttttttttttttttttttttttt

SEQ ID NO: 7613 - DNA, 84 bp, Artificial
  Barcode component
  misc_feature (33)..(34): n is a, c, g, or t
  misc_feature (43)..(44): n is a, c, g, or t
  misc_feature (53)..(54): n is a, c, g, or t
tttttttaagcagtggtatcaacgcagagtacnntcttgtggnnctcatgacnntttttttttttttttttttttttttttttt

SEQ ID NO: 7614 - DNA, 84 bp, Artificial
  Barcode component
  misc_feature (33)..(34): n is a, c, g, or t
  misc_feature (43)..(44): n is a, c, g, or t
  misc_feature (53)..(54): n is a, c, g, or t
tttttttaagcagtggtatcaacgcagagtacnntcttgtggnngtatccagnntttttttttttttttttttttttttttttt

SEQ ID NO: 7615 - DNA, 84 bp, Artificial
  Barcode component
  misc_feature (33)..(34): n is a, c, g, or t
  misc_feature (43)..(44): n is a, c, g, or t
  misc_feature (53)..(54): n is a, c, g, or t
tttttttaagcagtggtatcaacgcagagtacnntcttgtggnnacgcctatnntttttttttttttttttttttttttttttt

SEQ ID NO: 7616 - DNA, 84 bp, Artificial
  Barcode component
  misc_feature (33)..(34): n is a, c, g, or t
  misc_feature (43)..(44): n is a, c, g, or t
  misc_feature (53)..(54): n is a, c, g, or t
tttttttaagcagtggtatcaacgcagagtacnntcttgtggnnaacgacctnntttttttttttttttttttttttttttttt

SEQ ID NO: 7617 - DNA, 84 bp, Artificial
  Barcode component
  misc_feature (33)..(34): n is a, c, g, or t
  misc_feature (43)..(44): n is a, c, g, or t
  misc_feature (53)..(54): n is a, c, g, or t
tttttttaagcagtggtatcaacgcagagtacnntcttgtggnnatcaggctnntttttttttttttttttttttttttttttt

SEQ ID NO: 7618 - DNA, 84 bp, Artificial
  Barcode component
  misc_feature (33)..(34): n is a, c, g, or t
  misc_feature (43)..(44): n is a, c, g, or t
  misc_feature (53)..(54): n is a, c, g, or t
tttttttaagcagtggtatcaacgcagagtacnntcttgtggnncaagttcgnntttttttttttttttttttttttttttttt

SEQ ID NO: 7619 - DNA, 84 bp, Artificial
  Barcode component
  misc_feature (33)..(34): n is a, c, g, or t
  misc_feature (43)..(44): n is a, c, g, or t
  misc_feature (53)..(54): n is a, c, g, or t
tttttttaagcagtggtatcaacgcagagtacnntcttgtggnntagccaganntttttttttttttttttttttttttttttt

SEQ ID NO: 7620 - DNA, 84 bp, Artificial
  Barcode component
  misc_feature (33)..(34): n is a, c, g, or t
  misc_feature (43)..(44): n is a, c, g, or t
  misc_feature (53)..(54): n is a, c, g, or t
tttttttaagcagtggtatcaacgcagagtacnntcttgtggnncaatcacgnntttttttttttttttttttttttttttttt

SEQ ID NO: 7621 - DNA, 84 bp, Artificial
  Barcode component
  misc_feature (33)..(34): n is a, c, g, or t
  misc_feature (43)..(44): n is a, c, g, or t
  misc_feature (53)..(54): n is a, c, g, or t
tttttttaagcagtggtatcaacgcagagtacnntcttgtggnngcaacaagnntttttttttttttttttttttttttttttt

SEQ ID NO: 7622 - DNA, 84 bp, Artificial
  Barcode component
  misc_feature (33)..(34): n is a, c, g, or t
  misc_feature (43)..(44): n is a, c, g, or t
  misc_feature (53)..(54): n is a, c, g, or t
tttttttaagcagtggtatcaacgcagagtacnntcttgtggnncacgacaanntttttttttttttttttttttttttttttt

SEQ ID NO: 7623 - DNA, 84 bp, Artificial
  Barcode component
  misc_feature (33)..(34): n is a, c, g, or t
  misc_feature (43)..(44): n is a, c, g, or t
  misc_feature (53)..(54): n is a, c, g, or t
tttttttaagcagtggtatcaacgcagagtacnntcttgtggnntacggaganntttttttttttttttttttttttttttttt

SEQ ID NO: 7624 - DNA, 84 bp, Artificial
  Barcode component
  misc_feature (33)..(34): n is a, c, g, or t
  misc_feature (43)..(44): n is a, c, g, or t
  misc_feature (53)..(54): n is a, c, g, or t
tttttttaagcagtggtatcaacgcagagtacnntcttgtggnncgacaaganntttttttttttttttttttttttttttttt

SEQ ID NO: 7625 - DNA, 84 bp, Artificial
  Barcode component
  misc_feature (33)..(34): n is a, c, g, or t
  misc_feature (43)..(44): n is a, c, g, or t
  misc_feature (53)..(54): n is a, c, g, or t
tttttttaagcagtggtatcaacgcagagtacnntcttgtggnncgaagtganntttttttttttttttttttttttttttttt

SEQ ID NO: 7626 - DNA, 84 bp, Artificial
  Barcode component
  misc_feature (33)..(34): n is a, c, g, or t
  misc_feature (43)..(44): n is a, c, g, or t
  misc_feature (53)..(54): n is a, c, g, or t
tttttttaagcagtggtatcaacgcagagtacnntcttgtggnnagctggtanntttttttttttttttttttttttttttttt

SEQ ID NO: 7627 - DNA, 84 bp, Artificial
  Barcode component
  misc_feature (33)..(34): n is a, c, g, or t
  misc_feature (43)..(44): n is a, c, g, or t
  misc_feature (53)..(54): n is a, c, g, or t
tttttttaagcagtggtatcaacgcagagtacnntcttgtggnnaactaggcnntttttttttttttttttttttttttttttt

SEQ ID NO: 7628 - DNA, 84 bp, Artificial
  Barcode component
  misc_feature (33)..(34): n is a, c, g, or t
  misc_feature (43)..(44): n is a, c, g, or t
  misc_feature (53)..(54): n is a, c, g, or t
tttttttaagcagtggtatcaacgcagagtacnntcttgtggnncagcaagtnntttttttttttttttttttttttttttttt

SEQ ID NO: 7629 - DNA, 84 bp, Artificial
  Barcode component
  misc_feature (33)..(34): n is a, c, g, or t
  misc_feature (43)..(44): n is a, c, g, or t
  misc_feature (53)..(54): n is a, c, g, or t
tttttttaagcagtggtatcaacgcagagtacnntcttgtggnnacgaggtanntttttttttttttttttttttttttttttt

SEQ ID NO: 7630 - DNA, 84 bp, Artificial
  Barcode component
  misc_feature (33)..(34): n is a, c, g, or t
  misc_feature (43)..(44): n is a, c, g, or t
  misc_feature (53)..(54): n is a, c, g, or t
tttttttaagcagtggtatcaacgcagagtacnntcttgtggnncatcttccnntttttttttttttttttttttttttttttt

SEQ ID NO: 7631 - DNA, 84 bp, Artificial
  Barcode component
  misc_feature (33)..(34): n is a, c, g, or t
  misc_feature (43)..(44): n is a, c, g, or t
  misc_feature (53)..(54): n is a, c, g, or t
tttttttaagcagtggtatcaacgcagagtacnntcttgtggnncctgaatcnntttttttttttttttttttttttttttttt

SEQ ID NO: 7632 - DNA, 84 bp, Artificial
  Barcode component
  misc_feature (33)..(34): n is a, c, g, or t
  misc_feature (43)..(44): n is a, c, g, or t
  misc_feature (53)..(54): n is a, c, g, or t
tttttttaagcagtggtatcaacgcagagtacnntcttgtggnntgcagactnntttttttttttttttttttttttttttttt

SEQ ID NO: 7633 - DNA, 84 bp, Artificial
  Barcode component
  misc_feature (33)..(34): n is a, c, g, or t
  misc_feature (43)..(44): n is a, c, g, or t
  misc_feature (53)..(54): n is a, c, g, or t
tttttttaagcagtggtatcaacgcagagtacnntcttgtggnnagatgtggnntttttttttttttttttttttttttttttt

SEQ ID NO: 7634 - DNA, 84 bp, Artificial
  Barcode component
  misc_feature (33)..(34): n is a, c, g, or t
  misc_feature (43)..(44): n is a, c, g, or t
  misc_feature (53)..(54): n is a, c, g, or t
tttttttaagcagtggtatcaacgcagagtacnntcttgtggnnagttcgacnntttttttttttttttttttttttttttttt

SEQ ID NO: 7635 - DNA, 84 bp, Artificial
  Barcode component
  misc_feature (33)..(34): n is a, c, g, or t
  misc_feature (43)..(44): n is a, c, g, or t
  misc_feature (53)..(54): n is a, c, g, or t
tttttttaagcagtggtatcaacgcagagtacnntcttgtggnnacaacctcnntttttttttttttttttttttttttttttt

SEQ ID NO: 7636 - DNA, 84 bp, Artificial
  Barcode component
  misc_feature (33)..(34): n is a, c, g, or t
  misc_feature (43)..(44): n is a, c, g, or t
  misc_feature (53)..(54): n is a, c, g, or t
tttttttaagcagtggtatcaacgcagagtacnntcttgtggnncatggtagnntttttttttttttttttttttttttttttt

SEQ ID NO: 7637 - DNA, 84 bp, Artificial
  Barcode component
  misc_feature (33)..(34): n is a, c, g, or t
  misc_feature (43)..(44): n is a, c, g, or t
  misc_feature (53)..(54): n is a, c, g, or t
tttttttaagcagtggtatcaacgcagagtacnntcttgtggnncgtatctcnntttttttttttttttttttttttttttttt

SEQ ID NO: 7638 - DNA, 84 bp, Artificial
  Barcode component
  misc_feature (33)..(34): n is a, c, g, or t
  misc_feature (43)..(44): n is a, c, g, or t
  misc_feature (53)..(54): n is a, c, g, or t
tttttttaagcagtggtatcaacgcagagtacnntcttgtggnncctagttcnntttttttttttttttttttttttttttttt

SEQ ID NO: 7639 - DNA, 84 bp, Artificial
  Barcode component
  misc_feature (33)..(34): n is a, c, g, or t
  misc_feature (43)..(44): n is a, c, g, or t
  misc_feature (53)..(54): n is a, c, g, or t
tttttttaagcagtggtatcaacgcagagtacnntcttgtggnncaagagtcnntttttttttttttttttttttttttttttt

SEQ ID NO: 7640 - DNA, 84 bp, Artificial
  Barcode component
  misc_feature (33)..(34): n is a, c, g, or t
  misc_feature (43)..(44): n is a, c, g, or t
  misc_feature (53)..(54): n is a, c, g, or t
tttttttaagcagtggtatcaacgcagagtacnnccttcagannaatcggcanntttttttttttttttttttttttttttttt

SEQ ID NO: 7641 - DNA, 84 bp, Artificial
  Barcode component
  misc_feature (33)..(34): n is a, c, g, or t
  misc_feature (43)..(44): n is a, c, g, or t
  misc_feature (53)..(54): n is a, c, g, or t
tttttttaagcagtggtatcaacgcagagtacnnccttcaganntacggcatnntttttttttttttttttttttttttttttt

SEQ ID NO: 7642 - DNA, 84 bp, Artificial
  Barcode component
  misc_feature (33)..(34): n is a, c, g, or t
  misc_feature (43)..(44): n is a, c, g, or t
  misc_feature (53)..(54): n is a, c, g, or t
tttttttaagcagtggtatcaacgcagagtacnnccttcagannttggatcgnntttttttttttttttttttttttttttttt

SEQ ID NO: 7643 - DNA, 84 bp, Artificial
  Barcode component
  misc_feature (33)..(34): n is a, c, g, or t
  misc_feature (43)..(44): n is a, c, g, or t
  misc_feature (53)..(54): n is a, c, g, or t
tttttttaagcagtggtatcaacgcagagtacnnccttcaganntggaacganntttttttttttttttttttttttttttttt

SEQ ID NO: 7644 - DNA, 84 bp, Artificial
  Barcode component
  misc_feature (33)..(34): n is a, c, g, or t
  misc_feature (43)..(44): n is a, c, g, or t
  misc_feature (53)..(54): n is a, c, g, or t
tttttttaagcagtggtatcaacgcagagtacnnccttcagannggcaatcanntttttttttttttttttttttttttttttt

SEQ ID NO: 7645 - DNA, 84 bp, Artificial
  Barcode component
  misc_feature (33)..(34): n is a, c, g, or t
  misc_feature (43)..(44): n is a, c, g, or t
  misc_feature (53)..(54): n is a, c, g, or t
tttttttaagcagtggtatcaacgcagagtacnnccttcaganngaatccganntttttttttttttttttttttttttttttt

SEQ ID NO: 7646 - DNA, 84 bp, Artificial
  Barcode component
  misc_feature (33)..(34): n is a, c, g, or t
  misc_feature (43)..(44): n is a, c, g, or t
  misc_feature (53)..(54): n is a, c, g, or t
tttttttaagcagtggtatcaacgcagagtacnnccttcagannttacggtgnntttttttttttttttttttttttttttttt

SEQ ID NO: 7647 - DNA, 84 bp, Artificial
  Barcode component
  misc_feature (33)..(34): n is a, c, g, or t
  misc_feature (43)..(44): n is a, c, g, or t
  misc_feature (53)..(54): n is a, c, g, or t
tttttttaagcagtggtatcaacgcagagtacnnccttcaganncatatcggnntttttttttttttttttttttttttttttt

SEQ ID NO: 7648 - DNA, 84 bp, Artificial
  Barcode component
  misc_feature (33)..(34): n is a, c, g, or t
  misc_feature (43)..(44): n is a, c, g, or t
  misc_feature (53)..(54): n is a, c, g, or t
tttttttaagcagtggtatcaacgcagagtacnnccttcaganncttcggtanntttttttttttttttttttttttttttttt

SEQ ID NO: 7649 - DNA, 84 bp, Artificial
  Barcode component
  misc_feature (33)..(34): n is a, c, g, or t
  misc_feature (43)..(44): n is a, c, g, or t
  misc_feature (53)..(54): n is a, c, g, or t
tttttttaagcagtggtatcaacgcagagtacnnccttcaganntcctaacgnntttttttttttttttttttttttttttttt

SEQ ID NO: 7650 - DNA, 84 bp, Artificial
  Barcode component
  misc_feature (33)..(34): n is a, c, g, or t
  misc_feature (43)..(44): n is a, c, g, or t
  misc_feature (53)..(54): n is a, c, g, or t
tttttttaagcagtggtatcaacgcagagtacnnccttcaganngtaagccanntttttttttttttttttttttttttttttt

SEQ ID NO: 7651 - DNA, 84 bp, Artificial
  Barcode component
  misc_feature (33)..(34): n is a, c, g, or t
  misc_feature (43)..(44): n is a, c, g, or t
  misc_feature (53)..(54): n is a, c, g, or t
tttttttaagcagtggtatcaacgcagagtacnnccttcaganntaaggtggnntttttttttttttttttttttttttttttt

SEQ ID NO: 7652 - DNA, 84 bp, Artificial
  Barcode component
  misc_feature (33)..(34): n is a, c, g, or t
  misc_feature (43)..(44): n is a, c, g, or t
  misc_feature (53)..(54): n is a, c, g, or t
tttttttaagcagtggtatcaacgcagagtacnnccttcagannggtaagctnntttttttttttttttttttttttttttttt

SEQ ID NO: 7653 - DNA, 84 bp, Artificial
  Barcode component
  misc_feature (33)..(34): n is a, c, g, or t
  misc_feature (43)..(44): n is a, c, g, or t
  misc_feature (53)..(54): n is a, c, g, or t
tttttttaagcagtggtatcaacgcagagtacnnccttcaganntgtgtcganntttttttttttttttttttttttttttttt

SEQ ID NO: 7654 - DNA, 84 bp, Artificial
  Barcode component
  misc_feature (33)..(34): n is a, c, g, or t
  misc_feature (43)..(44): n is a, c, g, or t
  misc_feature (53)..(54): n is a, c, g, or t
tttttttaagcagtggtatcaacgcagagtacnnccttcaganngagcatganntttttttttttttttttttttttttttttt

SEQ ID NO: 7655 - DNA, 84 bp, Artificial
  Barcode component
  misc_feature (33)..(34): n is a, c, g, or t
  misc_feature (43)..(44): n is a, c, g, or t
  misc_feature (53)..(54): n is a, c, g, or t
tttttttaagcagtggtatcaacgcagagtacnnccttcaganntcgaagtcnntttttttttttttttttttttttttttttt

SEQ ID NO: 7656 - DNA, 84 bp, Artificial
  Barcode component
  misc_feature (33)..(34): n is a, c, g, or t
  misc_feature (43)..(44): n is a, c, g, or t
  misc_feature (53)..(54): n is a, c, g, or t
tttttttaagcagtggtatcaacgcagagtacnnccttcagannggtgaacanntttttttttttttttttttttttttttttt

SEQ ID NO: 7657 - DNA, 84 bp, Artificial
  Barcode component
  misc_feature (33)..(34): n is a, c, g, or t
  misc_feature (43)..(44): n is a, c, g, or t
  misc_feature (53)..(54): n is a, c, g, or t
tttttttaagcagtggtatcaacgcagagtacnnccttcagannacatgcacnntttttttttttttttttttttttttttttt

SEQ ID NO: 7658 - DNA, 84 bp, Artificial
  Barcode component
  misc_feature (33)..(34): n is a, c, g, or t
  misc_feature (43)..(44): n is a, c, g, or t
  misc_feature (53)..(54): n is a, c, g, or t
tttttttaagcagtggtatcaacgcagagtacnnccttcagannccaacagtnntttttttttttttttttttttttttttttt

SEQ ID NO: 7659 - DNA, 84 bp, Artificial
  Barcode component
  misc_feature (33)..(34): n is a, c, g, or t
  misc_feature (43)..(44): n is a, c, g, or t
  misc_feature (53)..(54): n is a, c, g, or t
tttttttaagcagtggtatcaacgcagagtacnnccttcagannagaacagcnntttttttttttttttttttttttttttttt

SEQ ID NO: 7660 - DNA, 84 bp, Artificial
  Barcode component
  misc_feature (33)..(34): n is a, c, g, or t
  misc_feature (43)..(44): n is a, c, g, or t
  misc_feature (53)..(54): n is a, c, g, or t
tttttttaagcagtggtatcaacgcagagtacnnccttcaganngaacacgtnntttttttttttttttttttttttttttttt

SEQ ID NO: 7661 - DNA, 84 bp, Artificial
  Barcode component
  misc_feature (33)..(34): n is a, c, g, or t
  misc_feature (43)..(44): n is a, c, g, or t
  misc_feature (53)..(54): n is a, c, g, or t
tttttttaagcagtggtatcaacgcagagtacnnccttcagannggtcttcanntttttttttttttttttttttttttttttt

SEQ ID NO: 7662 - DNA, 84 bp, Artificial
  Barcode component
  misc_feature (33)..(34): n is a, c, g, or t
  misc_feature (43)..(44): n is a, c, g, or t
  misc_feature (53)..(54): n is a, c, g, or t
tttttttaagcagtggtatcaacgcagagtacnnccttcagannaggttcagnntttttttttttttttttttttttttttttt

SEQ ID NO: 7663 - DNA, 84 bp, Artificial
  Barcode component
  misc_feature (33)..(34): n is a, c, g, or t
  misc_feature (43)..(44): n is a, c, g, or t
  misc_feature (53)..(54): n is a, c, g, or t
tttttttaagcagtggtatcaacgcagagtacnnccttcagannctagagcanntttttttttttttttttttttttttttttt

SEQ ID NO: 7664 - DNA, 84 bp, Artificial
  Barcode component
  misc_feature (33)..(34): n is a, c, g, or t
  misc_feature (43)..(44): n is a, c, g, or t
  misc_feature (53)..(54): n is a, c, g, or t
tttttttaagcagtggtatcaacgcagagtacnnccttcaganncttctagcnntttttttttttttttttttttttttttttt

SEQ ID NO: 7665 - DNA, 84 bp, Artificial
  Barcode component
  misc_feature (33)..(34): n is a, c, g, or t
  misc_feature (43)..(44): n is a, c, g, or t
  misc_feature (53)..(54): n is a, c, g, or t
tttttttaagcagtggtatcaacgcagagtacnnccttcaganngagtaacgnntttttttttttttttttttttttttttttt

SEQ ID NO: 7666 - DNA, 84 bp, Artificial
  Barcode component
  misc_feature (33)..(34): n is a, c, g, or t
  misc_feature (43)..(44): n is a, c, g, or t
  misc_feature (53)..(54): n is a, c, g, or t
tttttttaagcagtggtatcaacgcagagtacnnccttcagannctaagaggnntttttttttttttttttttttttttttttt

SEQ ID NO: 7667 - DNA, 84 bp, Artificial
  Barcode component
  misc_feature (33)..(34): n is a, c, g, or t
  misc_feature (43)..(44): n is a, c, g, or t
  misc_feature (53)..(54): n is a, c, g, or t
tttttttaagcagtggtatcaacgcagagtacnnccttcagannacgtgtagnntttttttttttttttttttttttttttttt

SEQ ID NO: 7668 - DNA, 84 bp, Artificial
  Barcode component
  misc_feature (33)..(34): n is a, c, g, or t
  misc_feature (43)..(44): n is a, c, g, or t
  misc_feature (53)..(54): n is a, c, g, or t
tttttttaagcagtggtatcaacgcagagtacnnccttcagannactacaggnntttttttttttttttttttttttttttttt

SEQ ID NO: 7669 - DNA, 84 bp, Artificial
  Barcode component
  misc_feature (33)..(34): n is a, c, g, or t
  misc_feature (43)..(44): n is a, c, g, or t
  misc_feature (53)..(54): n is a, c, g, or t
tttttttaagcagtggtatcaacgcagagtacnnccttcaganntacaggtcnntttttttttttttttttttttttttttttt

SEQ ID NO: 7670 - DNA, 84 bp, Artificial
  Barcode component
  misc_feature (33)..(34): n is a, c, g, or t
  misc_feature (43)..(44): n is a, c, g, or t
  misc_feature (53)..(54): n is a, c, g, or t
tttttttaagcagtggtatcaacgcagagtacnnccttcagannctcacatgnntttttttttttttttttttttttttttttt

SEQ ID NO: 7671 - DNA, 84 bp, Artificial
  Barcode component
  misc_feature (33)..(34): n is a, c, g, or t
  misc_feature (43)..(44): n is a, c, g, or t
  misc_feature (53)..(54): n is a, c, g, or t
tttttttaagcagtggtatcaacgcagagtacnnccttcagannactaggagnntttttttttttttttttttttttttttttt

SEQ ID NO: 7672 - DNA, 84 bp, Artificial
  Barcode component
  misc_feature (33)..(34): n is a, c, g, or t
  misc_feature (43)..(44): n is a, c, g, or t
  misc_feature (53)..(54): n is a, c, g, or t
tttttttaagcagtggtatcaacgcagagtacnnccttcagannccatagganntttttttttttttttttttttttttttttt

SEQ ID NO: 7673 - DNA, 84 bp, Artificial
  Barcode component
  misc_feature (33)..(34): n is a, c, g, or t
  misc_feature (43)..(44): n is a, c, g, or t
  misc_feature (53)..(54): n is a, c, g, or t
tttttttaagcagtggtatcaacgcagagtacnnccttcagannggagaatcnntttttttttttttttttttttttttttttt

SEQ ID NO: 7674 - DNA, 84 bp, Artificial
  Barcode component
  misc_feature (33)..(34): n is a, c, g, or t
  misc_feature (43)..(44): n is a, c, g, or t
  misc_feature (53)..(54): n is a, c, g, or t
tttttttaagcagtggtatcaacgcagagtacnnccttcaganngccaagaanntttttttttttttttttttttttttttttt

SEQ ID NO: 7675 - DNA, 84 bp, Artificial
  Barcode component
  misc_feature (33)..(34): n is a, c, g, or t
  misc_feature (43)..(44): n is a, c, g, or t
  misc_feature (53)..(54): n is a, c, g, or t
tttttttaagcagtggtatcaacgcagagtacnnccttcagannaaggcaagnntttttttttttttttttttttttttttttt

SEQ ID NO: 7676 - DNA, 84 bp, Artificial
  Barcode component
  misc_feature (33)..(34): n is a, c, g, or t
  misc_feature (43)..(44): n is a, c, g, or t
  misc_feature (53)..(54): n is a, c, g, or t
tttttttaagcagtggtatcaacgcagagtacnnccttcagannaatgtcgcnntttttttttttttttttttttttttttttt

SEQ ID NO: 7677 - DNA, 84 bp, Artificial
  Barcode component
  misc_feature (33)..(34): n is a, c, g, or t
  misc_feature (43)..(44): n is a, c, g, or t
  misc_feature (53)..(54): n is a, c, g, or t
tttttttaagcagtggtatcaacgcagagtacnnccttcagannatggaaccnntttttttttttttttttttttttttttttt

SEQ ID NO: 7678 - DNA, 84 bp, Artificial
  Barcode component
  misc_feature (33)..(34): n is a, c, g, or t
  misc_feature (43)..(44): n is a, c, g, or t
  misc_feature (53)..(54): n is a, c, g, or t
tttttttaagcagtggtatcaacgcagagtacnnccttcagannagaggcatnntttttttttttttttttttttttttttttt

SEQ ID NO: 7679 - DNA, 84 bp, Artificial
  Barcode component
  misc_feature (33)..(34): n is a, c, g, or t
  misc_feature (43)..(44): n is a, c, g, or t
  misc_feature (53)..(54): n is a, c, g, or t
tttttttaagcagtggtatcaacgcagagtacnnccttcaganntgcatagcnntttttttttttttttttttttttttttttt

SEQ ID NO: 7680 - DNA, 84 bp, Artificial
  Barcode component
  misc_feature (33)..(34): n is a, c, g, or t
  misc_feature (43)..(44): n is a, c, g, or t
  misc_feature (53)..(54): n is a, c, g, or t
tttttttaagcagtggtatcaacgcagagtacnnccttcagannctaacgganntttttttttttttttttttttttttttttt

SEQ ID NO: 7681 - DNA, 84 bp, Artificial
  Barcode component
  misc_feature (33)..(34): n is a, c, g, or t
  misc_feature (43)..(44): n is a, c, g, or t
  misc_feature (53)..(54): n is a, c, g, or t
tttttttaagcagtggtatcaacgcagagtacnnccttcaganntatcgaggnntttttttttttttttttttttttttttttt

SEQ ID NO: 7682 - DNA, 84 bp, Artificial
  Barcode component
  misc_feature (33)..(34): n is a, c, g, or t
  misc_feature (43)..(44): n is a, c, g, or t
  misc_feature (53)..(54): n is a, c, g, or t
tttttttaagcagtggtatcaacgcagagtacnnccttcaganncatagcctnntttttttttttttttttttttttttttttt

SEQ ID NO: 7683 - DNA, 84 bp, Artificial
  Barcode component
  misc_feature (33)..(34): n is a, c, g, or t
  misc_feature (43)..(44): n is a, c, g, or t
  misc_feature (53)..(54): n is a, c, g, or t
tttttttaagcagtggtatcaacgcagagtacnnccttcagannatcgagacnntttttttttttttttttttttttttttttt

SEQ ID NO: 7684 - DNA, 84 bp, Artificial
  Barcode component
  misc_feature (33)..(34): n is a, c, g, or t
  misc_feature (43)..(44): n is a, c, g, or t
  misc_feature (53)..(54): n is a, c, g, or t
tttttttaagcagtggtatcaacgcagagtacnnccttcagannggaagagtnntttttttttttttttttttttttttttttt

SEQ ID NO: 7685 - DNA, 84 bp, Artificial
  Barcode component
  misc_feature (33)..(34): n is a, c, g, or t
  misc_feature (43)..(44): n is a, c, g, or t
  misc_feature (53)..(54): n is a, c, g, or t
tttttttaagcagtggtatcaacgcagagtacnnccttcagannccaagtagnntttttttttttttttttttttttttttttt

SEQ ID NO: 7686 - DNA, 84 bp, Artificial
  Barcode component
  misc_feature (33)..(34): n is a, c, g, or t
  misc_feature (43)..(44): n is a, c, g, or t
  misc_feature (53)..(54): n is a, c, g, or t
tttttttaagcagtggtatcaacgcagagtacnnccttcagannctgaacagnntttttttttttttttttttttttttttttt

SEQ ID NO: 7687 - DNA, 84 bp, Artificial
  Barcode component
  misc_feature (33)..(34): n is a, c, g, or t
  misc_feature (43)..(44): n is a, c, g, or t
  misc_feature (53)..(54): n is a, c, g, or t
tttttttaagcagtggtatcaacgcagagtacnnccttcaganngtaggttcnntttttttttttttttttttttttttttttt

SEQ ID NO: 7688 - DNA, 84 bp, Artificial
  Barcode component
  misc_feature (33)..(34): n is a, c, g, or t
  misc_feature (43)..(44): n is a, c, g, or t
  misc_feature (53)..(54): n is a, c, g, or t
tttttttaagcagtggtatcaacgcagagtacnnccttcaganngtatggacnntttttttttttttttttttttttttttttt

SEQ ID NO: 7689 - DNA, 84 bp, Artificial
  Barcode component
  misc_feature (33)..(34): n is a, c, g, or t
  misc_feature (43)..(44): n is a, c, g, or t
  misc_feature (53)..(54): n is a, c, g, or t
tttttttaagcagtggtatcaacgcagagtacnnccttcaganntcgcaacanntttttttttttttttttttttttttttttt

SEQ ID NO: 7690 - DNA, 84 bp, Artificial
  Barcode component
  misc_feature (33)..(34): n is a, c, g, or t
  misc_feature (43)..(44): n is a, c, g, or t
  misc_feature (53)..(54): n is a, c, g, or t
tttttttaagcagtggtatcaacgcagagtacnnccttcagannccgctaatnntttttttttttttttttttttttttttttt

SEQ ID NO: 7691 - DNA, 84 bp, Artificial
  Barcode component
  misc_feature (33)..(34): n is a, c, g, or t
  misc_feature (43)..(44): n is a, c, g, or t
  misc_feature (53)..(54): n is a, c, g, or t
tttttttaagcagtggtatcaacgcagagtacnnccttcaganngattcgcanntttttttttttttttttttttttttttttt

SEQ ID NO: 7692 - DNA, 84 bp, Artificial
  Barcode component
  misc_feature (33)..(34): n is a, c, g, or t
  misc_feature (43)..(44): n is a, c, g, or t
  misc_feature (53)..(54): n is a, c, g, or t
tttttttaagcagtggtatcaacgcagagtacnnccttcaganncgatggaanntttttttttttttttttttttttttttttt

SEQ ID NO: 7693 - DNA, 84 bp, Artificial
  Barcode component
  misc_feature (33)..(34): n is a, c, g, or t
  misc_feature (43)..(44): n is a, c, g, or t
  misc_feature (53)..(54): n is a, c, g, or t
tttttttaagcagtggtatcaacgcagagtacnnccttcagannagcaagganntttttttttttttttttttttttttttttt

SEQ ID NO: 7694 - DNA, 84 bp, Artificial
  Barcode component
  misc_feature (33)..(34): n is a, c, g, or t
  misc_feature (43)..(44): n is a, c, g, or t
  misc_feature (53)..(54): n is a, c, g, or t
tttttttaagcagtggtatcaacgcagagtacnnccttcaganncgtagcaanntttttttttttttttttttttttttttttt

SEQ ID NO: 7695 - DNA, 84 bp, Artificial
  Barcode component
  misc_feature (33)..(34): n is a, c, g, or t
  misc_feature (43)..(44): n is a, c, g, or t
  misc_feature (53)..(54): n is a, c, g, or t
tttttttaagcagtggtatcaacgcagagtacnnccttcaganntggcagtanntttttttttttttttttttttttttttttt

SEQ ID NO: 7696 - DNA, 84 bp, Artificial
  Barcode component
  misc_feature (33)..(34): n is a, c, g, or t
  misc_feature (43)..(44): n is a, c, g, or t
  misc_feature (53)..(54): n is a, c, g, or t
tttttttaagcagtggtatcaacgcagagtacnnccttcaganncggtagttnntttttttttttttttttttttttttttttt

SEQ ID NO: 7697 - DNA, 84 bp, Artificial
  Barcode component
  misc_feature (33)..(34): n is a, c, g, or t
  misc_feature (43)..(44): n is a, c, g, or t
  misc_feature (53)..(54): n is a, c, g, or t
tttttttaagcagtggtatcaacgcagagtacnnccttcaganntgacttcgnntttttttttttttttttttttttttttttt

SEQ ID NO: 7698 - DNA, 84 bp, Artificial
  Barcode component
  misc_feature (33)..(34): n is a, c, g, or t
  misc_feature (43)..(44): n is a, c, g, or t
  misc_feature (53)..(54): n is a, c, g, or t
tttttttaagcagtggtatcaacgcagagtacnnccttcaganngagtgcaanntttttttttttttttttttttttttttttt

SEQ ID NO: 7699 - DNA, 84 bp, Artificial
  Barcode component
  misc_feature (33)..(34): n is a, c, g, or t
  misc_feature (43)..(44): n is a, c, g, or t
  misc_feature (53)..(54): n is a, c, g, or t
tttttttaagcagtggtatcaacgcagagtacnnccttcagannacggtaacnntttttttttttttttttttttttttttttt

SEQ ID NO: 7700 - DNA, 84 bp, Artificial
  Barcode component
  misc_feature (33)..(34): n is a, c, g, or t
  misc_feature (43)..(44): n is a, c, g, or t
  misc_feature (53)..(54): n is a, c, g, or t
tttttttaagcagtggtatcaacgcagagtacnnccttcagannaagtggtgnntttttttttttttttttttttttttttttt

SEQ ID NO: 7701 - DNA, 84 bp, Artificial
  Barcode component
  misc_feature (33)..(34): n is a, c, g, or t
  misc_feature (43)..(44): n is a, c, g, or t
  misc_feature (53)..(54): n is a, c, g, or t
tttttttaagcagtggtatcaacgcagagtacnnccttcagannggagacaanntttttttttttttttttttttttttttttt

SEQ ID NO: 7702 - DNA, 84 bp, Artificial
  Barcode component
  misc_feature (33)..(34): n is a, c, g, or t
  misc_feature (43)..(44): n is a, c, g, or t
  misc_feature (53)..(54): n is a, c, g, or t
tttttttaagcagtggtatcaacgcagagtacnnccttcaganntcaaggacnntttttttttttttttttttttttttttttt

SEQ ID NO: 7703 - DNA, 84 bp, Artificial
  Barcode component
  misc_feature (33)..(34): n is a, c, g, or t
  misc_feature (43)..(44): n is a, c, g, or t
  misc_feature (53)..(54): n is a, c, g, or t
tttttttaagcagtggtatcaacgcagagtacnnccttcagannaagagagcnntttttttttttttttttttttttttttttt

SEQ ID NO: 7704 - DNA, 84 bp, Artificial
  Barcode component
  misc_feature (33)..(34): n is a, c, g, or t
  misc_feature (43)..(44): n is a, c, g, or t
  misc_feature (53)..(54): n is a, c, g, or t
tttttttaagcagtggtatcaacgcagagtacnnccttcaganncgagagatnntttttttttttttttttttttttttttttt

SEQ ID NO: 7705 - DNA, 84 bp, Artificial
  Barcode component
  misc_feature (33)..(34): n is a, c, g, or t
  misc_feature (43)..(44): n is a, c, g, or t
  misc_feature (53)..(54): n is a, c, g, or t
tttttttaagcagtggtatcaacgcagagtacnnccttcagannacagatggnntttttttttttttttttttttttttttttt

SEQ ID NO: 7706 - DNA, 84 bp, Artificial
  Barcode component
  misc_feature (33)..(34): n is a, c, g, or t
  misc_feature (43)..(44): n is a, c, g, or t
  misc_feature (53)..(54): n is a, c, g, or t
tttttttaagcagtggtatcaacgcagagtacnnccttcagannaggagtcanntttttttttttttttttttttttttttttt

SEQ ID NO: 7707 - DNA, 84 bp, Artificial
  Barcode component
  misc_feature (33)..(34): n is a, c, g, or t
  misc_feature (43)..(44): n is a, c, g, or t
  misc_feature (53)..(54): n is a, c, g, or t
tttttttaagcagtggtatcaacgcagagtacnnccttcaganncgtgttacnntttttttttttttttttttttttttttttt

SEQ ID NO: 7708 - DNA, 84 bp, Artificial
  Barcode component
  misc_feature (33)..(34): n is a, c, g, or t
  misc_feature (43)..(44): n is a, c, g, or t
  misc_feature (53)..(54): n is a, c, g, or t
tttttttaagcagtggtatcaacgcagagtacnnccttcaganntagtgtgcnntttttttttttttttttttttttttttttt

SEQ ID NO: 7709 - DNA, 84 bp, Artificial
  Barcode component
  misc_feature (33)..(34): n is a, c, g, or t
  misc_feature (43)..(44): n is a, c, g, or t
  misc_feature (53)..(54): n is a, c, g, or t
tttttttaagcagtggtatcaacgcagagtacnnccttcagannctcatgacnntttttttttttttttttttttttttttttt

SEQ ID NO: 7710 - DNA, 84 bp, Artificial
  Barcode component
  misc_feature (33)..(34): n is a, c, g, or t
  misc_feature (43)..(44): n is a, c, g, or t
  misc_feature (53)..(54): n is a, c, g, or t
tttttttaagcagtggtatcaacgcagagtacnnccttcaganngtatccagnntttttttttttttttttttttttttttttt

SEQ ID NO: 7711 - DNA, 84 bp, Artificial
  Barcode component
  misc_feature (33)..(34): n is a, c, g, or t
  misc_feature (43)..(44): n is a, c, g, or t
  misc_feature (53)..(54): n is a, c, g, or t
tttttttaagcagtggtatcaacgcagagtacnnccttcagannacgcctatnntttttttttttttttttttttttttttttt

SEQ ID NO: 7712 - DNA, 84 bp, Artificial
  Barcode component
  misc_feature (33)..(34): n is a, c, g, or t
  misc_feature (43)..(44): n is a, c, g, or t
  misc_feature (53)..(54): n is a, c, g, or t
tttttttaagcagtggtatcaacgcagagtacnnccttcagannaacgacctnntttttttttttttttttttttttttttttt

SEQ ID NO: 7713 - DNA, 84 bp, Artificial
  Barcode component
  misc_feature (33)..(34): n is a, c, g, or t
  misc_feature (43)..(44): n is a, c, g, or t
  misc_feature (53)..(54): n is a, c, g, or t
tttttttaagcagtggtatcaacgcagagtacnnccttcagannatcaggctnntttttttttttttttttttttttttttttt

SEQ ID NO: 7714 - DNA, 84 bp, Artificial
  Barcode component
  misc_feature (33)..(34): n is a, c, g, or t
  misc_feature (43)..(44): n is a, c, g, or t
  misc_feature (53)..(54): n is a, c, g, or t
tttttttaagcagtggtatcaacgcagagtacnnccttcaganncaagttcgnntttttttttttttttttttttttttttttt

SEQ ID NO: 7715 - DNA, 84 bp, Artificial
  Barcode component
  misc_feature (33)..(34): n is a, c, g, or t
  misc_feature (43)..(44): n is a, c, g, or t
  misc_feature (53)..(54): n is a, c, g, or t
tttttttaagcagtggtatcaacgcagagtacnnccttcaganntagccaganntttttttttttttttttttttttttttttt

SEQ ID NO: 7716 - DNA, 84 bp, Artificial
  Barcode component
  misc_feature (33)..(34): n is a, c, g, or t
  misc_feature (43)..(44): n is a, c, g, or t
  misc_feature (53)..(54): n is a, c, g, or t
tttttttaagcagtggtatcaacgcagagtacnnccttcaganncaatcacgnntttttttttttttttttttttttttttttt

SEQ ID NO: 7717 - DNA, 84 bp, Artificial
  Barcode component
  misc_feature (33)..(34): n is a, c, g, or t
  misc_feature (43)..(44): n is a, c, g, or t
  misc_feature (53)..(54): n is a, c, g, or t
tttttttaagcagtggtatcaacgcagagtacnnccttcaganngcaacaagnntttttttttttttttttttttttttttttt

SEQ ID NO: 7718 - DNA, 84 bp, Artificial
  Barcode component
  misc_feature (33)..(34): n is a, c, g, or t
  misc_feature (43)..(44): n is a, c, g, or t
  misc_feature (53)..(54): n is a, c, g, or t
tttttttaagcagtggtatcaacgcagagtacnnccttcaganncacgacaanntttttttttttttttttttttttttttttt

SEQ ID NO: 7719 - DNA, 84 bp, Artificial
  Barcode component
  misc_feature (33)..(34): n is a, c, g, or t
  misc_feature (43)..(44): n is a, c, g, or t
  misc_feature (53)..(54): n is a, c, g, or t
tttttttaagcagtggtatcaacgcagagtacnnccttcaganntacggaganntttttttttttttttttttttttttttttt

SEQ ID NO: 7720 - DNA, 84 bp, Artificial
  Barcode component
  misc_feature (33)..(34): n is a, c, g, or t
  misc_feature (43)..(44): n is a, c, g, or t
  misc_feature (53)..(54): n is a, c, g, or t
tttttttaagcagtggtatcaacgcagagtacnnccttcaganncgacaaganntttttttttttttttttttttttttttttt

SEQ ID NO: 7721 - DNA, 84 bp, Artificial
  Barcode component
  misc_feature (33)..(34): n is a, c, g, or t
  misc_feature (43)..(44): n is a, c, g, or t
  misc_feature (53)..(54): n is a, c, g, or t
tttttttaagcagtggtatcaacgcagagtacnnccttcaganncgaagtganntttttttttttttttttttttttttttttt

SEQ ID NO: 7722 - DNA, 84 bp, Artificial
  Barcode component
  misc_feature (33)..(34): n is a, c, g, or t
  misc_feature (43)..(44): n is a, c, g, or t
  misc_feature (53)..(54): n is a, c, g, or t
tttttttaagcagtggtatcaacgcagagtacnnccttcagannagctggtanntttttttttttttttttttttttttttttt

SEQ ID NO: 7723 - DNA, 84 bp, Artificial
  Barcode component
  misc_feature (33)..(34): n is a, c, g, or t
  misc_feature (43)..(44): n is a, c, g, or t
  misc_feature (53)..(54): n is a, c, g, or t
tttttttaagcagtggtatcaacgcagagtacnnccttcagannaactaggcnntttttttttttttttttttttttttttttt

SEQ ID NO: 7724 - DNA, 84 bp, Artificial
  Barcode component
  misc_feature (33)..(34): n is a, c, g, or t
  misc_feature (43)..(44): n is a, c, g, or t
  misc_feature (53)..(54): n is a, c, g, or t
tttttttaagcagtggtatcaacgcagagtacnnccttcaganncagcaagtnntttttttttttttttttttttttttttttt

SEQ ID NO: 7725 - DNA, 84 bp, Artificial
  Barcode component
  misc_feature (33)..(34): n is a, c, g, or t
  misc_feature (43)..(44): n is a, c, g, or t
  misc_feature (53)..(54): n is a, c, g, or t
tttttttaagcagtggtatcaacgcagagtacnnccttcagannacgaggtanntttttttttttttttttttttttttttttt

SEQ ID NO: 7726 - DNA, 84 bp, Artificial
  Barcode component
  misc_feature (33)..(34): n is a, c, g, or t
  misc_feature (43)..(44): n is a, c, g, or t
  misc_feature (53)..(54): n is a, c, g, or t
tttttttaagcagtggtatcaacgcagagtacnnccttcaganncatcttccnntttttttttttttttttttttttttttttt

SEQ ID NO: 7727 - DNA, 84 bp, Artificial
  Barcode component
  misc_feature (33)..(34): n is a, c, g, or t
  misc_feature (43)..(44): n is a, c, g, or t
  misc_feature (53)..(54): n is a, c, g, or t
tttttttaagcagtggtatcaacgcagagtacnnccttcaganncctgaatcnntttttttttttttttttttttttttttttt

SEQ ID NO: 7728 - DNA, 84 bp, Artificial
  Barcode component
  misc_feature (33)..(34): n is a, c, g, or t
  misc_feature (43)..(44): n is a, c, g, or t
  misc_feature (53)..(54): n is a, c, g, or t
tttttttaagcagtggtatcaacgcagagtacnnccttcaganntgcagactnntttttttttttttttttttttttttttttt

SEQ ID NO: 7729 - DNA, 84 bp, Artificial
  Barcode component
  misc_feature (33)..(34): n is a, c, g, or t
  misc_feature (43)..(44): n is a, c, g, or t
  misc_feature (53)..(54): n is a, c, g, or t
tttttttaagcagtggtatcaacgcagagtacnnccttcagannagatgtggnntttttttttttttttttttttttttttttt

SEQ ID NO: 7730 - DNA, 84 bp, Artificial
  Barcode component
  misc_feature (33)..(34): n is a, c, g, or t
  misc_feature (43)..(44): n is a, c, g, or t
  misc_feature (53)..(54): n is a, c, g, or t
tttttttaagcagtggtatcaacgcagagtacnnccttcagannagttcgacnntttttttttttttttttttttttttttttt

SEQ ID NO: 7731 - DNA, 84 bp, Artificial
  Barcode component
  misc_feature (33)..(34): n is a, c, g, or t
  misc_feature (43)..(44): n is a, c, g, or t
  misc_feature (53)..(54): n is a, c, g, or t
tttttttaagcagtggtatcaacgcagagtacnnccttcagannacaacctcnntttttttttttttttttttttttttttttt

SEQ ID NO: 7732 - DNA, 84 bp, Artificial
  Barcode component
  misc_feature (33)..(34): n is a, c, g, or t
  misc_feature (43)..(44): n is a, c, g, or t
  misc_feature (53)..(54): n is a, c, g, or t
tttttttaagcagtggtatcaacgcagagtacnnccttcaganncatggtagnntttttttttttttttttttttttttttttt

SEQ ID NO: 7733 - DNA, 84 bp, Artificial
  Barcode component
  misc_feature (33)..(34): n is a, c, g, or t
  misc_feature (43)..(44): n is a, c, g, or t
  misc_feature (53)..(54): n is a, c, g, or t
tttttttaagcagtggtatcaacgcagagtacnnccttcaganncgtatctcnntttttttttttttttttttttttttttttt

SEQ ID NO: 7734 - DNA, 84 bp, Artificial
  Barcode component
  misc_feature (33)..(34): n is a, c, g, or t
  misc_feature (43)..(44): n is a, c, g, or t
  misc_feature (53)..(54): n is a, c, g, or t
tttttttaagcagtggtatcaacgcagagtacnnccttcaganncctagttcnntttttttttttttttttttttttttttttt

SEQ ID NO: 7735 - DNA, 84 bp, Artificial
  Barcode component
  misc_feature (33)..(34): n is a, c, g, or t
  misc_feature (43)..(44): n is a, c, g, or t
  misc_feature (53)..(54): n is a, c, g, or t
tttttttaagcagtggtatcaacgcagagtacnnccttcaganncaagagtcnntttttttttttttttttttttttttttttt

SEQ ID NO: 7736 - DNA, 84 bp, Artificial
  Barcode component
  misc_feature (33)..(34): n is a, c, g, or t
  misc_feature (43)..(44): n is a, c, g, or t
  misc_feature (53)..(54): n is a, c, g, or t
tttttttaagcagtggtatcaacgcagagtacnncctcatgtnnaatcggcanntttttttttttttttttttttttttttttt

SEQ ID NO: 7737 - DNA, 84 bp, Artificial
  Barcode component
  misc_feature (33)..(34): n is a, c, g, or t
  misc_feature (43)..(44): n is a, c, g, or t
  misc_feature (53)..(54): n is a, c, g, or t
tttttttaagcagtggtatcaacgcagagtacnncctcatgtnntacggcatnntttttttttttttttttttttttttttttt

SEQ ID NO: 7738 - DNA, 84 bp, Artificial
  Barcode component
  misc_feature (33)..(34): n is a, c, g, or t
  misc_feature (43)..(44): n is a, c, g, or t
  misc_feature (53)..(54): n is a, c, g, or t
tttttttaagcagtggtatcaacgcagagtacnncctcatgtnnttggatcgnntttttttttttttttttttttttttttttt

SEQ ID NO: 7739 - DNA, 84 bp, Artificial
  Barcode component
  misc_feature (33)..(34): n is a, c, g, or t
  misc_feature (43)..(44): n is a, c, g, or t
  misc_feature (53)..(54): n is a, c, g, or t
tttttttaagcagtggtatcaacgcagagtacnncctcatgtnntggaacganntttttttttttttttttttttttttttttt

SEQ ID NO: 7740 - DNA, 84 bp, Artificial
  Barcode component
  misc_feature (33)..(34): n is a, c, g, or t
  misc_feature (43)..(44): n is a, c, g, or t
  misc_feature (53)..(54): n is a, c, g, or t
tttttttaagcagtggtatcaacgcagagtacnncctcatgtnnggcaatcanntttttttttttttttttttttttttttttt

SEQ ID NO: 7741 - DNA, 84 bp, Artificial
  Barcode component
  misc_feature (33)..(34): n is a, c, g, or t
  misc_feature (43)..(44): n is a, c, g, or t
  misc_feature (53)..(54): n is a, c, g, or t
tttttttaagcagtggtatcaacgcagagtacnncctcatgtnngaatccganntttttttttttttttttttttttttttttt

SEQ ID NO: 7742 - DNA, 84 bp, Artificial
  Barcode component
  misc_feature (33)..(34): n is a, c, g, or t
  misc_feature (43)..(44): n is a, c, g, or t
  misc_feature (53)..(54): n is a, c, g, or t
tttttttaagcagtggtatcaacgcagagtacnncctcatgtnnttacggtgnntttttttttttttttttttttttttttttt

SEQ ID NO: 7743 - DNA, 84 bp, Artificial
  Barcode component
  misc_feature (33)..(34): n is a, c, g, or t
  misc_feature (43)..(44): n is a, c, g, or t
  misc_feature (53)..(54): n is a, c, g, or t
tttttttaagcagtggtatcaacgcagagtacnncctcatgtnncatatcggnntttttttttttttttttttttttttttttt

SEQ ID NO: 7744 - DNA, 84 bp, Artificial
  Barcode component
  misc_feature (33)..(34): n is a, c, g, or t
  misc_feature (43)..(44): n is a, c, g, or t
  misc_feature (53)..(54): n is a, c, g, or t
tttttttaagcagtggtatcaacgcagagtacnncctcatgtnncttcggtanntttttttttttttttttttttttttttttt

SEQ ID NO: 7745 - DNA, 84 bp, Artificial
  Barcode component
  misc_feature (33)..(34): n is a, c, g, or t
  misc_feature (43)..(44): n is a, c, g, or t
  misc_feature (53)..(54): n is a, c, g, or t
tttttttaagcagtggtatcaacgcagagtacnncctcatgtnntcctaacgnntttttttttttttttttttttttttttttt

SEQ ID NO: 7746 - DNA, 84 bp, Artificial
  Barcode component
  misc_feature (33)..(34): n is a, c, g, or t
  misc_feature (43)..(44): n is a, c, g, or t
  misc_feature (53)..(54): n is a, c, g, or t
tttttttaagcagtggtatcaacgcagagtacnncctcatgtnngtaagccanntttttttttttttttttttttttttttttt

SEQ ID NO: 7747 - DNA, 84 bp, Artificial
  Barcode component
  misc_feature (33)..(34): n is a, c, g, or t
  misc_feature (43)..(44): n is a, c, g, or t
  misc_feature (53)..(54): n is a, c, g, or t
tttttttaagcagtggtatcaacgcagagtacnncctcatgtnntaaggtggnntttttttttttttttttttttttttttttt

SEQ ID NO: 7748 - DNA, 84 bp, Artificial
  Barcode component
  misc_feature (33)..(34): n is a, c, g, or t
  misc_feature (43)..(44): n is a, c, g, or t
  misc_feature (53)..(54): n is a, c, g, or t
tttttttaagcagtggtatcaacgcagagtacnncctcatgtnnggtaagctnntttttttttttttttttttttttttttttt

SEQ ID NO: 7749 - DNA, 84 bp, Artificial
  Barcode component
  misc_feature (33)..(34): n is a, c, g, or t
  misc_feature (43)..(44): n is a, c, g, or t
  misc_feature (53)..(54): n is a, c, g, or t
tttttttaagcagtggtatcaacgcagagtacnncctcatgtnntgtgtcganntttttttttttttttttttttttttttttt

SEQ ID NO: 7750 - DNA, 84 bp, Artificial
  Barcode component
  misc_feature (33)..(34): n is a, c, g, or t
  misc_feature (43)..(44): n is a, c, g, or t
  misc_feature (53)..(54): n is a, c, g, or t
tttttttaagcagtggtatcaacgcagagtacnncctcatgtnngagcatganntttttttttttttttttttttttttttttt

SEQ ID NO: 7751 - DNA, 84 bp, Artificial
  Barcode component
  misc_feature (33)..(34): n is a, c, g, or t
  misc_feature (43)..(44): n is a, c, g, or t
  misc_feature (53)..(54): n is a, c, g, or t
tttttttaagcagtggtatcaacgcagagtacnncctcatgtnntcgaagtcnntttttttttttttttttttttttttttttt

SEQ ID NO: 7752 - DNA, 84 bp, Artificial
  Barcode component
  misc_feature (33)..(34): n is a, c, g, or t
  misc_feature (43)..(44): n is a, c, g, or t
  misc_feature (53)..(54): n is a, c, g, or t
tttttttaagcagtggtatcaacgcagagtacnncctcatgtnnggtgaacanntttttttttttttttttttttttttttttt

SEQ ID NO: 7753 - DNA, 84 bp, Artificial
  Barcode component
  misc_feature (33)..(34): n is a, c, g, or t
  misc_feature (43)..(44): n is a, c, g, or t
  misc_feature (53)..(54): n is a, c, g, or t
tttttttaagcagtggtatcaacgcagagtacnncctcatgtnnacatgcacnntttttttttttttttttttttttttttttt

SEQ ID NO: 7754 - DNA, 84 bp, Artificial
  Barcode component
  misc_feature (33)..(34): n is a, c, g, or t
  misc_feature (43)..(44): n is a, c, g, or t
  misc_feature (53)..(54): n is a, c, g, or t
tttttttaagcagtggtatcaacgcagagtacnncctcatgtnnccaacagtnntttttttttttttttttttttttttttttt

SEQ ID NO: 7755 - DNA, 84 bp, Artificial
  Barcode component
  misc_feature (33)..(34): n is a, c, g, or t
  misc_feature (43)..(44): n is a, c, g, or t
  misc_feature (53)..(54): n is a, c, g, or t
tttttttaagcagtggtatcaacgcagagtacnncctcatgtnnagaacagcnntttttttttttttttttttttttttttttt

SEQ ID NO: 7756 - DNA, 84 bp, Artificial
  Barcode component
  misc_feature (33)..(34): n is a, c, g, or t
  misc_feature (43)..(44): n is a, c, g, or t
  misc_feature (53)..(54): n is a, c, g, or t
tttttttaagcagtggtatcaacgcagagtacnncctcatgtnngaacacgtnntttttttttttttttttttttttttttttt

SEQ ID NO: 7757 - DNA, 84 bp, Artificial
  Barcode component
  misc_feature (33)..(34): n is a, c, g, or t
  misc_feature (43)..(44): n is a, c, g, or t
  misc_feature (53)..(54): n is a, c, g, or t
tttttttaagcagtggtatcaacgcagagtacnncctcatgtnnggtcttcanntttttttttttttttttttttttttttttt

SEQ ID NO: 7758 - DNA, 84 bp, Artificial
  Barcode component
  misc_feature (33)..(34): n is a, c, g, or t
  misc_feature (43)..(44): n is a, c, g, or t
  misc_feature (53)..(54): n is a, c, g, or t
tttttttaagcagtggtatcaacgcagagtacnncctcatgtnnaggttcagnntttttttttttttttttttttttttttttt

SEQ ID NO: 7759 - DNA, 84 bp, Artificial
  Barcode component
  misc_feature (33)..(34): n is a, c, g, or t
  misc_feature (43)..(44): n is a, c, g, or t
  misc_feature (53)..(54): n is a, c, g, or t
tttttttaagcagtggtatcaacgcagagtacnncctcatgtnnctagagcanntttttttttttttttttttttttttttttt

SEQ ID NO: 7760 - DNA, 84 bp, Artificial
  Barcode component
  misc_feature (33)..(34): n is a, c, g, or t
  misc_feature (43)..(44): n is a, c, g, or t
  misc_feature (53)..(54): n is a, c, g, or t
tttttttaagcagtggtatcaacgcagagtacnncctcatgtnncttctagcnntttttttttttttttttttttttttttttt

SEQ ID NO: 7761 - DNA, 84 bp, Artificial
  Barcode component
  misc_feature (33)..(34): n is a, c, g, or t
  misc_feature (43)..(44): n is a, c, g, or t
  misc_feature (53)..(54): n is a, c, g, or t
tttttttaagcagtggtatcaacgcagagtacnncctcatgtnngagtaacgnntttttttttttttttttttttttttttttt

SEQ ID NO: 7762 - DNA, 84 bp, Artificial
  Barcode component
  misc_feature (33)..(34): n is a, c, g, or t
  misc_feature (43)..(44): n is a, c, g, or t
  misc_feature (53)..(54): n is a, c, g, or t
tttttttaagcagtggtatcaacgcagagtacnncctcatgtnnctaagaggnntttttttttttttttttttttttttttttt

SEQ ID NO: 7763 - DNA, 84 bp, Artificial
  Barcode component
  misc_feature (33)..(34): n is a, c, g, or t
  misc_feature (43)..(44): n is a, c, g, or t
  misc_feature (53)..(54): n is a, c, g, or t
tttttttaagcagtggtatcaacgcagagtacnncctcatgtnnacgtgtagnntttttttttttttttttttttttttttttt

SEQ ID NO: 7764 - DNA, 84 bp, Artificial
  Barcode component
  misc_feature (33)..(34): n is a, c, g, or t
  misc_feature (43)..(44): n is a, c, g, or t
  misc_feature (53)..(54): n is a, c, g, or t
tttttttaagcagtggtatcaacgcagagtacnncctcatgtnnactacaggnntttttttttttttttttttttttttttttt

SEQ ID NO: 7765 - DNA, 84 bp, Artificial
  Barcode component
  misc_feature (33)..(34): n is a, c, g, or t
  misc_feature (43)..(44): n is a, c, g, or t
  misc_feature (53)..(54): n is a, c, g, or t
tttttttaagcagtggtatcaacgcagagtacnncctcatgtnntacaggtcnntttttttttttttttttttttttttttttt

SEQ ID NO: 7766 - DNA, 84 bp, Artificial
  Barcode component
  misc_feature (33)..(34): n is a, c, g, or t
  misc_feature (43)..(44): n is a, c, g, or t
  misc_feature (53)..(54): n is a, c, g, or t
tttttttaagcagtggtatcaacgcagagtacnncctcatgtnnctcacatgnntttttttttttttttttttttttttttttt

SEQ ID NO: 7767 - DNA, 84 bp, Artificial
  Barcode component
  misc_feature (33)..(34): n is a, c, g, or t
  misc_feature (43)..(44): n is a, c, g, or t
  misc_feature (53)..(54): n is a, c, g, or t
tttttttaagcagtggtatcaacgcagagtacnncctcatgtnnactaggagnntttttttttttttttttttttttttttttt

SEQ ID NO: 7768 - DNA, 84 bp, Artificial
  Barcode component
  misc_feature (33)..(34): n is a, c, g, or t
  misc_feature (43)..(44): n is a, c, g, or t
  misc_feature (53)..(54): n is a, c, g, or t
tttttttaagcagtggtatcaacgcagagtacnncctcatgtnnccatagganntttttttttttttttttttttttttttttt

SEQ ID NO: 7769 - DNA, 84 bp, Artificial
  Barcode component
  misc_feature (33)..(34): n is a, c, g, or t
  misc_feature (43)..(44): n is a, c, g, or t
  misc_feature (53)..(54): n is a, c, g, or t
tttttttaagcagtggtatcaacgcagagtacnncctcatgtnnggagaatcnntttttttttttttttttttttttttttttt

SEQ ID NO: 7770 - DNA, 84 bp, Artificial
  Barcode component
  misc_feature (33)..(34): n is a, c, g, or t
  misc_feature (43)..(44): n is a, c, g, or t
  misc_feature (53)..(54): n is a, c, g, or t
tttttttaagcagtggtatcaacgcagagtacnncctcatgtnngccaagaanntttttttttttttttttttttttttttttt

SEQ ID NO: 7771 - DNA, 84 bp, Artificial
  Barcode component
  misc_feature (33)..(34): n is a, c, g, or t
  misc_feature (43)..(44): n is a, c, g, or t
  misc_feature (53)..(54): n is a, c, g, or t
tttttttaagcagtggtatcaacgcagagtacnncctcatgtnnaaggcaagnntttttttttttttttttttttttttttttt

SEQ ID NO: 7772 - DNA, 84 bp, Artificial
  Barcode component
  misc_feature (33)..(34): n is a, c, g, or t
  misc_feature (43)..(44): n is a, c, g, or t
  misc_feature (53)..(54): n is a, c, g, or t
tttttttaagcagtggtatcaacgcagagtacnncctcatgtnnaatgtcgcnntttttttttttttttttttttttttttttt

SEQ ID NO: 7773 - DNA, 84 bp, Artificial
  Barcode component
  misc_feature (33)..(34): n is a, c, g, or t
  misc_feature (43)..(44): n is a, c, g, or t
  misc_feature (53)..(54): n is a, c, g, or t
tttttttaagcagtggtatcaacgcagagtacnncctcatgtnnatggaaccnntttttttttttttttttttttttttttttt

SEQ ID NO: 7774 - DNA, 84 bp, Artificial
  Barcode component
  misc_feature (33)..(34): n is a, c, g, or t
  misc_feature (43)..(44): n is a, c, g, or t
  misc_feature (53)..(54): n is a, c, g, or t
tttttttaagcagtggtatcaacgcagagtacnncctcatgtnnagaggcatnntttttttttttttttttttttttttttttt

SEQ ID NO: 7775 - DNA, 84 bp, Artificial
  Barcode component
  misc_feature (33)..(34): n is a, c, g, or t
  misc_feature (43)..(44): n is a, c, g, or t
  misc_feature (53)..(54): n is a, c, g, or t
tttttttaagcagtggtatcaacgcagagtacnncctcatgtnntgcatagcnntttttttttttttttttttttttttttttt

SEQ ID NO: 7776 - DNA, 84 bp, Artificial
  Barcode component
  misc_feature (33)..(34): n is a, c, g, or t
  misc_feature (43)..(44): n is a, c, g, or t
  misc_feature (53)..(54): n is a, c, g, or t
tttttttaagcagtggtatcaacgcagagtacnncctcatgtnnctaacgganntttttttttttttttttttttttttttttt

SEQ ID NO: 7777 - DNA, 84 bp, Artificial
  Barcode component
  misc_feature (33)..(34): n is a, c, g, or t
  misc_feature (43)..(44): n is a, c, g, or t
  misc_feature (53)..(54): n is a, c, g, or t
tttttttaagcagtggtatcaacgcagagtacnncctcatgtnntatcgaggnntttttttttttttttttttttttttttttt

SEQ ID NO: 7778 - DNA, 84 bp, Artificial
  Barcode component
  misc_feature (33)..(34): n is a, c, g, or t
  misc_feature (43)..(44): n is a, c, g, or t
  misc_feature (53)..(54): n is a, c, g, or t
tttttttaagcagtggtatcaacgcagagtacnncctcatgtnncatagcctnntttttttttttttttttttttttttttttt

SEQ ID NO: 7779 - DNA, 84 bp, Artificial
  Barcode component
  misc_feature (33)..(34): n is a, c, g, or t
  misc_feature (43)..(44): n is a, c, g, or t
  misc_feature (53)..(54): n is a, c, g, or t
tttttttaagcagtggtatcaacgcagagtacnncctcatgtnnatcgagacnntttttttttttttttttttttttttttttt

SEQ ID NO: 7780 - DNA, 84 bp, Artificial
  Barcode component
  misc_feature (33)..(34): n is a, c, g, or t
  misc_feature (43)..(44): n is a, c, g, or t
  misc_feature (53)..(54): n is a, c, g, or t
tttttttaagcagtggtatcaacgcagagtacnncctcatgtnnggaagagtnntttttttttttttttttttttttttttttt

SEQ ID NO: 7781 - DNA, 84 bp, Artificial
  Barcode component
  misc_feature (33)..(34): n is a, c, g, or t
  misc_feature (43)..(44): n is a, c, g, or t
  misc_feature (53)..(54): n is a, c, g, or t
tttttttaagcagtggtatcaacgcagagtacnncctcatgtnnccaagtagnntttttttttttttttttttttttttttttt

SEQ ID NO: 7782 - DNA, 84 bp, Artificial
  Barcode component
  misc_feature (33)..(34): n is a, c, g, or t
  misc_feature (43)..(44): n is a, c, g, or t
  misc_feature (53)..(54): n is a, c, g, or t
tttttttaagcagtggtatcaacgcagagtacnncctcatgtnnctgaacagnntttttttttttttttttttttttttttttt

SEQ ID NO: 7783 - DNA, 84 bp, Artificial
  Barcode component
  misc_feature (33)..(34): n is a, c, g, or t
  misc_feature (43)..(44): n is a, c, g, or t
  misc_feature (53)..(54): n is a, c, g, or t
tttttttaagcagtggtatcaacgcagagtacnncctcatgtnngtaggttcnntttttttttttttttttttttttttttttt

SEQ ID NO: 7784 - DNA, 84 bp, Artificial
  Barcode component
  misc_feature (33)..(34): n is a, c, g, or t
  misc_feature (43)..(44): n is a, c, g, or t
  misc_feature (53)..(54): n is a, c, g, or t
tttttttaagcagtggtatcaacgcagagtacnncctcatgtnngtatggacnntttttttttttttttttttttttttttttt

SEQ ID NO: 7785 - DNA, 84 bp, Artificial
  Barcode component
  misc_feature (33)..(34): n is a, c, g, or t
  misc_feature (43)..(44): n is a, c, g, or t
  misc_feature (53)..(54): n is a, c, g, or t
tttttttaagcagtggtatcaacgcagagtacnncctcatgtnntcgcaacanntttttttttttttttttttttttttttttt

SEQ ID NO: 7786 - DNA, 84 bp, Artificial
  Barcode component
  misc_feature (33)..(34): n is a, c, g, or t
  misc_feature (43)..(44): n is a, c, g, or t
  misc_feature (53)..(54): n is a, c, g, or t
tttttttaagcagtggtatcaacgcagagtacnncctcatgtnnccgctaatnntttttttttttttttttttttttttttttt

SEQ ID NO: 7787 - DNA, 84 bp, Artificial
  Barcode component
  misc_feature (33)..(34): n is a, c, g, or t
  misc_feature (43)..(44): n is a, c, g, or t
  misc_feature (53)..(54): n is a, c, g, or t
tttttttaagcagtggtatcaacgcagagtacnncctcatgtnngattcgcanntttttttttttttttttttttttttttttt

SEQ ID NO: 7788 - DNA, 84 bp, Artificial
  Barcode component
  misc_feature (33)..(34): n is a, c, g, or t
  misc_feature (43)..(44): n is a, c, g, or t
  misc_feature (53)..(54): n is a, c, g, or t
tttttttaagcagtggtatcaacgcagagtacnncctcatgtnncgatggaanntttttttttttttttttttttttttttttt

SEQ ID NO: 7789 - DNA, 84 bp, Artificial
  Barcode component
  misc_feature (33)..(34): n is a, c, g, or t
  misc_feature (43)..(44): n is a, c, g, or t
  misc_feature (53)..(54): n is a, c, g, or t
tttttttaagcagtggtatcaacgcagagtacnncctcatgtnnagcaagganntttttttttttttttttttttttttttttt

SEQ ID NO: 7790 - DNA, 84 bp, Artificial
  Barcode component
  misc_feature (33)..(34): n is a, c, g, or t
  misc_feature (43)..(44): n is a, c, g, or t
  misc_feature (53)..(54): n is a, c, g, or t
tttttttaagcagtggtatcaacgcagagtacnncctcatgtnncgtagcaanntttttttttttttttttttttttttttttt

SEQ ID NO: 7791 - DNA, 84 bp, Artificial
  Barcode component
  misc_feature (33)..(34): n is a, c, g, or t
  misc_feature (43)..(44): n is a, c, g, or t
  misc_feature (53)..(54): n is a, c, g, or t
tttttttaagcagtggtatcaacgcagagtacnncctcatgtnntggcagtanntttttttttttttttttttttttttttttt

SEQ ID NO: 7792 - DNA, 84 bp, Artificial
  Barcode component
  misc_feature (33)..(34): n is a, c, g, or t
  misc_feature (43)..(44): n is a, c, g, or t
  misc_feature (53)..(54): n is a, c, g, or t
tttttttaagcagtggtatcaacgcagagtacnncctcatgtnncggtagttnntttttttttttttttttttttttttttttt

SEQ ID NO: 7793 - DNA, 84 bp, Artificial
  Barcode component
  misc_feature (33)..(34): n is a, c, g, or t
  misc_feature (43)..(44): n is a, c, g, or t
  misc_feature (53)..(54): n is a, c, g, or t
tttttttaagcagtggtatcaacgcagagtacnncctcatgtnntgacttcgnntttttttttttttttttttttttttttttt

SEQ ID NO: 7794 - DNA, 84 bp, Artificial
  Barcode component
  misc_feature (33)..(34): n is a, c, g, or t
  misc_feature (43)..(44): n is a, c, g, or t
  misc_feature (53)..(54): n is a, c, g, or t
tttttttaagcagtggtatcaacgcagagtacnncctcatgtnngagtgcaanntttttttttttttttttttttttttttttt

SEQ ID NO: 7795 - DNA, 84 bp, Artificial
  Barcode component
  misc_feature (33)..(34): n is a, c, g, or t
  misc_feature (43)..(44): n is a, c, g, or t
  misc_feature (53)..(54): n is a, c, g, or t
tttttttaagcagtggtatcaacgcagagtacnncctcatgtnnacggtaacnntttttttttttttttttttttttttttttt

SEQ ID NO: 7796 - DNA, 84 bp, Artificial
  Barcode component
  misc_feature (33)..(34): n is a, c, g, or t
  misc_feature (43)..(44): n is a, c, g, or t
  misc_feature (53)..(54): n is a, c, g, or t
tttttttaagcagtggtatcaacgcagagtacnncctcatgtnnaagtggtgnntttttttttttttttttttttttttttttt

SEQ ID NO: 7797 - DNA, 84 bp, Artificial
  Barcode component
  misc_feature (33)..(34): n is a, c, g, or t
  misc_feature (43)..(44): n is a, c, g, or t
  misc_feature (53)..(54): n is a, c, g, or t
tttttttaagcagtggtatcaacgcagagtacnncctcatgtnnggagacaanntttttttttttttttttttttttttttttt

SEQ ID NO: 7798 - DNA, 84 bp, Artificial
  Barcode component
  misc_feature (33)..(34): n is a, c, g, or t
  misc_feature (43)..(44): n is a, c, g, or t
  misc_feature (53)..(54): n is a, c, g, or t
tttttttaagcagtggtatcaacgcagagtacnncctcatgtnntcaaggacnntttttttttttttttttttttttttttttt

SEQ ID NO: 7799 - DNA, 84 bp, Artificial
  Barcode component
  misc_feature (33)..(34): n is a, c, g, or t
  misc_feature (43)..(44): n is a, c, g, or t
  misc_feature (53)..(54): n is a, c, g, or t
tttttttaagcagtggtatcaacgcagagtacnncctcatgtnnaagagagcnntttttttttttttttttttttttttttttt

SEQ ID NO: 7800 - DNA, 84 bp, Artificial
  Barcode component
  misc_feature (33)..(34): n is a, c, g, or t
  misc_feature (43)..(44): n is a, c, g, or t
  misc_feature (53)..(54): n is a, c, g, or t
tttttttaagcagtggtatcaacgcagagtacnncctcatgtnncgagagatnntttttttttttttttttttttttttttttt

SEQ ID NO: 7801 - DNA, 84 bp, Artificial
  Barcode component
  misc_feature (33)..(34): n is a, c, g, or t
  misc_feature (43)..(44): n is a, c, g, or t
  misc_feature (53)..(54): n is a, c, g, or t
tttttttaagcagtggtatcaacgcagagtacnncctcatgtnnacagatggnntttttttttttttttttttttttttttttt

SEQ ID NO: 7802 - DNA, 84 bp, Artificial
  Barcode component
  misc_feature (33)..(34): n is a, c, g, or t
  misc_feature (43)..(44): n is a, c, g, or t
  misc_feature (53)..(54): n is a, c, g, or t
tttttttaagcagtggtatcaacgcagagtacnncctcatgtnnaggagtcanntttttttttttttttttttttttttttttt

SEQ ID NO: 7803 - DNA, 84 bp, Artificial
  Barcode component
  misc_feature (33)..(34): n is a, c, g, or t
  misc_feature (43)..(44): n is a, c, g, or t
  misc_feature (53)..(54): n is a, c, g, or t
tttttttaagcagtggtatcaacgcagagtacnncctcatgtnncgtgttacnntttttttttttttttttttttttttttttt

SEQ ID NO: 7804 - DNA, 84 bp, Artificial
  Barcode component
  misc_feature (33)..(34): n is a, c, g, or t
  misc_feature (43)..(44): n is a, c, g, or t
  misc_feature (53)..(54): n is a, c, g, or t
tttttttaagcagtggtatcaacgcagagtacnncctcatgtnntagtgtgcnntttttttttttttttttttttttttttttt

SEQ ID NO: 7805 - DNA, 84 bp, Artificial
  Barcode component
  misc_feature (33)..(34): n is a, c, g, or t
  misc_feature (43)..(44): n is a, c, g, or t
  misc_feature (53)..(54): n is a, c, g, or t
tttttttaagcagtggtatcaacgcagagtacnncctcatgtnnctcatgacnntttttttttttttttttttttttttttttt

SEQ ID NO: 7806 - DNA, 84 bp, Artificial
  Barcode component
  misc_feature (33)..(34): n is a, c, g, or t
  misc_feature (43)..(44): n is a, c, g, or t
  misc_feature (53)..(54): n is a, c, g, or t
tttttttaagcagtggtatcaacgcagagtacnncctcatgtnngtatccagnntttttttttttttttttttttttttttttt

SEQ ID NO: 7807 - DNA, 84 bp, Artificial
  Barcode component
  misc_feature (33)..(34): n is a, c, g, or t
  misc_feature (43)..(44): n is a, c, g, or t
  misc_feature (53)..(54): n is a, c, g, or t
tttttttaagcagtggtatcaacgcagagtacnncctcatgtnnacgcctatnntttttttttttttttttttttttttttttt

SEQ ID NO: 7808 - DNA, 84 bp, Artificial
  Barcode component
  misc_feature (33)..(34): n is a, c, g, or t
  misc_feature (43)..(44): n is a, c, g, or t
  misc_feature (53)..(54): n is a, c, g, or t
tttttttaagcagtggtatcaacgcagagtacnncctcatgtnnaacgacctnntttttttttttttttttttttttttttttt

SEQ ID NO: 7809 - DNA, 84 bp, Artificial
  Barcode component
  misc_feature (33)..(34): n is a, c, g, or t
  misc_feature (43)..(44): n is a, c, g, or t
  misc_feature (53)..(54): n is a, c, g, or t
tttttttaagcagtggtatcaacgcagagtacnncctcatgtnnatcaggctnntttttttttttttttttttttttttttttt

SEQ ID NO: 7810 - DNA, 84 bp, Artificial
  Barcode component
  misc_feature (33)..(34): n is a, c, g, or t
  misc_feature (43)..(44): n is a, c, g, or t
  misc_feature (53)..(54): n is a, c, g, or t
tttttttaagcagtggtatcaacgcagagtacnncctcatgtnncaagttcgnntttttttttttttttttttttttttttttt

SEQ ID NO: 7811 - DNA, 84 bp, Artificial
  Barcode component
  misc_feature (33)..(34): n is a, c, g, or t
  misc_feature (43)..(44): n is a, c, g, or t
  misc_feature (53)..(54): n is a, c, g, or t
tttttttaagcagtggtatcaacgcagagtacnncctcatgtnntagccaganntttttttttttttttttttttttttttttt

SEQ ID NO: 7812 - DNA, 84 bp, Artificial
  Barcode component
  misc_feature (33)..(34): n is a, c, g, or t
  misc_feature (43)..(44): n is a, c, g, or t
  misc_feature (53)..(54): n is a, c, g, or t
tttttttaagcagtggtatcaacgcagagtacnncctcatgtnncaatcacgnntttttttttttttttttttttttttttttt

SEQ ID NO: 7813 - DNA, 84 bp, Artificial
  Barcode component
  misc_feature (33)..(34): n is a, c, g, or t
  misc_feature (43)..(44): n is a, c, g, or t
  misc_feature (53)..(54): n is a, c, g, or t
tttttttaagcagtggtatcaacgcagagtacnncctcatgtnngcaacaagnntttttttttttttttttttttttttttttt

SEQ ID NO: 7814 - DNA, 84 bp, Artificial
  Barcode component
  misc_feature (33)..(34): n is a, c, g, or t
  misc_feature (43)..(44): n is a, c, g, or t
  misc_feature (53)..(54): n is a, c, g, or t
tttttttaagcagtggtatcaacgcagagtacnncctcatgtnncacgacaanntttttttttttttttttttttttttttttt

SEQ ID NO: 7815 - DNA, 84 bp, Artificial
  Barcode component
  misc_feature (33)..(34): n is a, c, g, or t
  misc_feature (43)..(44): n is a, c, g, or t
  misc_feature (53)..(54): n is a, c, g, or t
tttttttaagcagtggtatcaacgcagagtacnncctcatgtnntacggaganntttttttttttttttttttttttttttttt

SEQ ID NO: 7816 - DNA, 84 bp, Artificial
  Barcode component
  misc_feature (33)..(34): n is a, c, g, or t
  misc_feature (43)..(44): n is a, c, g, or t
  misc_feature (53)..(54): n is a, c, g, or t
tttttttaagcagtggtatcaacgcagagtacnncctcatgtnncgacaaganntttttttttttttttttttttttttttttt

SEQ ID NO: 7817 - DNA, 84 bp, Artificial
  Barcode component
  misc_feature (33)..(34): n is a, c, g, or t
  misc_feature (43)..(44): n is a, c, g, or t
  misc_feature (53)..(54): n is a, c, g, or t
tttttttaagcagtggtatcaacgcagagtacnncctcatgtnncgaagtganntttttttttttttttttttttttttttttt

SEQ ID NO: 7818 - DNA, 84 bp, Artificial
  Barcode component
  misc_feature (33)..(34): n is a, c, g, or t
  misc_feature (43)..(44): n is a, c, g, or t
  misc_feature (53)..(54): n is a, c, g, or t
tttttttaagcagtggtatcaacgcagagtacnncctcatgtnnagctggtanntttttttttttttttttttttttttttttt

SEQ ID NO: 7819 - DNA, 84 bp, Artificial
  Barcode component
  misc_feature (33)..(34): n is a, c, g, or t
  misc_feature (43)..(44): n is a, c, g, or t
  misc_feature (53)..(54): n is a, c, g, or t
tttttttaagcagtggtatcaacgcagagtacnncctcatgtnnaactaggcnntttttttttttttttttttttttttttttt

SEQ ID NO: 7820 - DNA, 84 bp, Artificial
  Barcode component
  misc_feature (33)..(34): n is a, c, g, or t
  misc_feature (43)..(44): n is a, c, g, or t
  misc_feature (53)..(54): n is a, c, g, or t
tttttttaagcagtggtatcaacgcagagtacnncctcatgtnncagcaagtnntttttttttttttttttttttttttttttt

SEQ ID NO: 7821 - DNA, 84 bp, Artificial
  Barcode component
  misc_feature (33)..(34): n is a, c, g, or t
  misc_feature (43)..(44): n is a, c, g, or t
  misc_feature (53)..(54): n is a, c, g, or t
tttttttaagcagtggtatcaacgcagagtacnncctcatgtnnacgaggtanntttttttttttttttttttttttttttttt

SEQ ID NO: 7822 - DNA, 84 bp, Artificial
  Barcode component
  misc_feature (33)..(34): n is a, c, g, or t
  misc_feature (43)..(44): n is a, c, g, or t
  misc_feature (53)..(54): n is a, c, g, or t
tttttttaagcagtggtatcaacgcagagtacnncctcatgtnncatcttccnntttttttttttttttttttttttttttttt

SEQ ID NO: 7823 - DNA, 84 bp, Artificial
  Barcode component
  misc_feature (33)..(34): n is a, c, g, or t
  misc_feature (43)..(44): n is a, c, g, or t
  misc_feature (53)..(54): n is a, c, g, or t
tttttttaagcagtggtatcaacgcagagtacnncctcatgtnncctgaatcnntttttttttttttttttttttttttttttt

SEQ ID NO: 7824 - DNA, 84 bp, Artificial
  Barcode component
  misc_feature (33)..(34): n is a, c, g, or t
  misc_feature (43)..(44): n is a, c, g, or t
  misc_feature (53)..(54): n is a, c, g, or t
tttttttaagcagtggtatcaacgcagagtacnncctcatgtnntgcagactnntttttttttttttttttttttttttttttt

SEQ ID NO: 7825 - DNA, 84 bp, Artificial
  Barcode component
  misc_feature (33)..(34): n is a, c, g, or t
  misc_feature (43)..(44): n is a, c, g, or t
  misc_feature (53)..(54): n is a, c, g, or t
tttttttaagcagtggtatcaacgcagagtacnncctcatgtnnagatgtggnntttttttttttttttttttttttttttttt

SEQ ID NO: 7826 - DNA, 84 bp, Artificial
  Barcode component
  misc_feature (33)..(34): n is a, c, g, or t
  misc_feature (43)..(44): n is a, c, g, or t
  misc_feature (53)..(54): n is a, c, g, or t
tttttttaagcagtggtatcaacgcagagtacnncctcatgtnnagttcgacnntttttttttttttttttttttttttttttt

SEQ ID NO: 7827 - DNA, 84 bp, Artificial
  Barcode component
  misc_feature (33)..(34): n is a, c, g, or t
  misc_feature (43)..(44): n is a, c, g, or t
  misc_feature (53)..(54): n is a, c, g, or t
tttttttaagcagtggtatcaacgcagagtacnncctcatgtnnacaacctcnntttttttttttttttttttttttttttttt

SEQ ID NO: 7828 - DNA, 84 bp, Artificial
  Barcode component
  misc_feature (33)..(34): n is a, c, g, or t
  misc_feature (43)..(44): n is a, c, g, or t
  misc_feature (53)..(54): n is a, c, g, or t
tttttttaagcagtggtatcaacgcagagtacnncctcatgtnncatggtagnntttttttttttttttttttttttttttttt

SEQ ID NO: 7829 - DNA, 84 bp, Artificial
  Barcode component
  misc_feature (33)..(34): n is a, c, g, or t
  misc_feature (43)..(44): n is a, c, g, or t
  misc_feature (53)..(54): n is a, c, g, or t
tttttttaagcagtggtatcaacgcagagtacnncctcatgtnncgtatctcnntttttttttttttttttttttttttttttt

SEQ ID NO: 7830 - DNA, 84 bp, Artificial
  Barcode component
  misc_feature (33)..(34): n is a, c, g, or t
  misc_feature (43)..(44): n is a, c, g, or t
  misc_feature (53)..(54): n is a, c, g, or t
tttttttaagcagtggtatcaacgcagagtacnncctcatgtnncctagttcnntttttttttttttttttttttttttttttt

SEQ ID NO: 7831 - DNA, 84 bp, Artificial
  Barcode component
  misc_feature (33)..(34): n is a, c, g, or t
  misc_feature (43)..(44): n is a, c, g, or t
  misc_feature (53)..(54): n is a, c, g, or t
tttttttaagcagtggtatcaacgcagagtacnncctcatgtnncaagagtcnntttttttttttttttttttttttttttttt

SEQ ID NO: 7832 - DNA, 84 bp, Artificial
  Barcode component
  misc_feature (33)..(34): n is a, c, g, or t
  misc_feature (43)..(44): n is a, c, g, or t
  misc_feature (53)..(54): n is a, c, g, or t
tttttttaagcagtggtatcaacgcagagtacnnggagtgttnnaatcggcanntttttttttttttttttttttttttttttt

SEQ ID NO: 7833 - DNA, 84 bp, Artificial
  Barcode component
  misc_feature (33)..(34): n is a, c, g, or t
  misc_feature (43)..(44): n is a, c, g, or t
  misc_feature (53)..(54): n is a, c, g, or t
tttttttaagcagtggtatcaacgcagagtacnnggagtgttnntacggcatnntttttttttttttttttttttttttttttt

SEQ ID NO: 7834 - DNA, 84 bp, Artificial
  Barcode component
  misc_feature (33)..(34): n is a, c, g, or t
  misc_feature (43)..(44): n is a, c, g, or t
  misc_feature (53)..(54): n is a, c, g, or t
tttttttaagcagtggtatcaacgcagagtacnnggagtgttnnttggatcgnntttttttttttttttttttttttttttttt

SEQ ID NO: 7835 - DNA, 84 bp, Artificial
  Barcode component
  misc_feature (33)..(34): n is a, c, g, or t
  misc_feature (43)..(44): n is a, c, g, or t
  misc_feature (53)..(54): n is a, c, g, or t
tttttttaagcagtggtatcaacgcagagtacnnggagtgttnntggaacganntttttttttttttttttttttttttttttt

SEQ ID NO: 7836 - DNA, 84 bp, Artificial
  Barcode component
  misc_feature (33)..(34): n is a, c, g, or t
  misc_feature (43)..(44): n is a, c, g, or t
  misc_feature (53)..(54): n is a, c, g, or t
tttttttaagcagtggtatcaacgcagagtacnnggagtgttnnggcaatcanntttttttttttttttttttttttttttttt

SEQ ID NO: 7837 - DNA, 84 bp, Artificial
  Barcode component
  misc_feature (33)..(34): n is a, c, g, or t
  misc_feature (43)..(44): n is a, c, g, or t
  misc_feature (53)..(54): n is a, c, g, or t
tttttttaagcagtggtatcaacgcagagtacnnggagtgttnngaatccganntttttttttttttttttttttttttttttt

SEQ ID NO: 7838 - DNA, 84 bp, Artificial
  Barcode component
  misc_feature (33)..(34): n is a, c, g, or t
  misc_feature (43)..(44): n is a, c, g, or t
  misc_feature (53)..(54): n is a, c, g, or t
tttttttaagcagtggtatcaacgcagagtacnnggagtgttnnttacggtgnntttttttttttttttttttttttttttttt

SEQ ID NO: 7839 - DNA, 84 bp, Artificial
  Barcode component
  misc_feature (33)..(34): n is a, c, g, or t
  misc_feature (43)..(44): n is a, c, g, or t
  misc_feature (53)..(54): n is a, c, g, or t
tttttttaagcagtggtatcaacgcagagtacnnggagtgttnncatatcggnntttttttttttttttttttttttttttttt

SEQ ID NO: 7840 - DNA, 84 bp, Artificial
  Barcode component
  misc_feature (33)..(34): n is a, c, g, or t
  misc_feature (43)..(44): n is a, c, g, or t
  misc_feature (53)..(54): n is a, c, g, or t
tttttttaagcagtggtatcaacgcagagtacnnggagtgttnncttcggtanntttttttttttttttttttttttttttttt

SEQ ID NO: 7841 - DNA, 84 bp, Artificial
  Barcode component
  misc_feature (33)..(34): n is a, c, g, or t
  misc_feature (43)..(44): n is a, c, g, or t
  misc_feature (53)..(54): n is a, c, g, or t
tttttttaagcagtggtatcaacgcagagtacnnggagtgttnntcctaacgnntttttttttttttttttttttttttttttt

SEQ ID NO: 7842 - DNA, 84 bp, Artificial
  Barcode component
  misc_feature (33)..(34): n is a, c, g, or t
  misc_feature (43)..(44): n is a, c, g, or t
  misc_feature (53)..(54): n is a, c, g, or t
tttttttaagcagtggtatcaacgcagagtacnnggagtgttnngtaagccanntttttttttttttttttttttttttttttt

SEQ ID NO: 7843 - DNA, 84 bp, Artificial
  Barcode component
  misc_feature (33)..(34): n is a, c, g, or t
  misc_feature (43)..(44): n is a, c, g, or t
  misc_feature (53)..(54): n is a, c, g, or t
tttttttaagcagtggtatcaacgcagagtacnnggagtgttnntaaggtggnntttttttttttttttttttttttttttttt

SEQ ID NO: 7844 - DNA, 84 bp, Artificial
  Barcode component
  misc_feature (33)..(34): n is a, c, g, or t
  misc_feature (43)..(44): n is a, c, g, or t
  misc_feature (53)..(54): n is a, c, g, or t
tttttttaagcagtggtatcaacgcagagtacnnggagtgttnnggtaagctnntttttttttttttttttttttttttttttt

SEQ ID NO: 7845 - DNA, 84 bp, Artificial
  Barcode component
  misc_feature (33)..(34): n is a, c, g, or t
  misc_feature (43)..(44): n is a, c, g, or t
  misc_feature (53)..(54): n is a, c, g, or t
tttttttaagcagtggtatcaacgcagagtacnnggagtgttnntgtgtcganntttttttttttttttttttttttttttttt

SEQ ID NO: 7846 - DNA, 84 bp, Artificial
  Barcode component
  misc_feature (33)..(34): n is a, c, g, or t
  misc_feature (43)..(44): n is a, c, g, or t
  misc_feature (53)..(54): n is a, c, g, or t
tttttttaagcagtggtatcaacgcagagtacnnggagtgttnngagcatganntttttttttttttttttttttttttttttt

SEQ ID NO: 7847 - DNA, 84 bp, Artificial
  Barcode component
  misc_feature (33)..(34): n is a, c, g, or t
  misc_feature (43)..(44): n is a, c, g, or t
  misc_feature (53)..(54): n is a, c, g, or t
tttttttaagcagtggtatcaacgcagagtacnnggagtgttnntcgaagtcnntttttttttttttttttttttttttttttt

SEQ ID NO: 7848 - DNA, 84 bp, Artificial
  Barcode component
  misc_feature (33)..(34): n is a, c, g, or t
  misc_feature (43)..(44): n is a, c, g, or t
  misc_feature (53)..(54): n is a, c, g, or t
tttttttaagcagtggtatcaacgcagagtacnnggagtgttnnggtgaacanntttttttttttttttttttttttttttttt

SEQ ID NO: 7849 - DNA, 84 bp, Artificial
  Barcode component
  misc_feature (33)..(34): n is a, c, g, or t
  misc_feature (43)..(44): n is a, c, g, or t
  misc_feature (53)..(54): n is a, c, g, or t
tttttttaagcagtggtatcaacgcagagtacnnggagtgttnnacatgcacnntttttttttttttttttttttttttttttt

SEQ ID NO: 7850 - DNA, 84 bp, Artificial
  Barcode component
  misc_feature (33)..(34): n is a, c, g, or t
  misc_feature (43)..(44): n is a, c, g, or t
  misc_feature (53)..(54): n is a, c, g, or t
tttttttaagcagtggtatcaacgcagagtacnnggagtgttnnccaacagtnntttttttttttttttttttttttttttttt

SEQ ID NO: 7851 - DNA, 84 bp, Artificial
  Barcode component
  misc_feature (33)..(34): n is a, c, g, or t
  misc_feature (43)..(44): n is a, c, g, or t
  misc_feature (53)..(54): n is a, c, g, or t
tttttttaagcagtggtatcaacgcagagtacnnggagtgttnnagaacagcnntttttttttttttttttttttttttttttt

SEQ ID NO: 7852 - DNA, 84 bp, Artificial
  Barcode component
  misc_feature (33)..(34): n is a, c, g, or t
  misc_feature (43)..(44): n is a, c, g, or t
  misc_feature (53)..(54): n is a, c, g, or t
tttttttaagcagtggtatcaacgcagagtacnnggagtgttnngaacacgtnntttttttttttttttttttttttttttttt

SEQ ID NO: 7853 - DNA, 84 bp, Artificial
  Barcode component
  misc_feature (33)..(34): n is a, c, g, or t
  misc_feature (43)..(44): n is a, c, g, or t
  misc_feature (53)..(54): n is a, c, g, or t
tttttttaagcagtggtatcaacgcagagtacnnggagtgttnnggtcttcanntttttttttttttttttttttttttttttt

SEQ ID NO: 7854 - DNA, 84 bp, Artificial
  Barcode component
  misc_feature (33)..(34): n is a, c, g, or t
  misc_feature (43)..(44): n is a, c, g, or t
  misc_feature (53)..(54): n is a, c, g, or t
tttttttaagcagtggtatcaacgcagagtacnnggagtgttnnaggttcagnntttttttttttttttttttttttttttttt

SEQ ID NO: 7855 - DNA, 84 bp, Artificial
  Barcode component
  misc_feature (33)..(34): n is a, c, g, or t
  misc_feature (43)..(44): n is a, c, g, or t
  misc_feature (53)..(54): n is a, c, g, or t
tttttttaagcagtggtatcaacgcagagtacnnggagtgttnnctagagcanntttttttttttttttttttttttttttttt

SEQ ID NO: 7856 - DNA, 84 bp, Artificial
  Barcode component
  misc_feature (33)..(34): n is a, c, g, or t
  misc_feature (43)..(44): n is a, c, g, or t
  misc_feature (53)..(54): n is a, c, g, or t
tttttttaagcagtggtatcaacgcagagtacnnggagtgttnncttctagcnntttttttttttttttttttttttttttttt

SEQ ID NO: 7857 - DNA, 84 bp, Artificial
  Barcode component
  misc_feature (33)..(34): n is a, c, g, or t
  misc_feature (43)..(44): n is a, c, g, or t
  misc_feature (53)..(54): n is a, c, g, or t
tttttttaagcagtggtatcaacgcagagtacnnggagtgttnngagtaacgnntttttttttttttttttttttttttttttt

SEQ ID NO: 7858 - DNA, 84 bp, Artificial
  Barcode component
  misc_feature (33)..(34): n is a, c, g, or t
  misc_feature (43)..(44): n is a, c, g, or t
  misc_feature (53)..(54): n is a, c, g, or t
tttttttaagcagtggtatcaacgcagagtacnnggagtgttnnctaagaggnntttttttttttttttttttttttttttttt

SEQ ID NO: 7859 - DNA, 84 bp, Artificial
  Barcode component
  misc_feature (33)..(34): n is a, c, g, or t
  misc_feature (43)..(44): n is a, c, g, or t
  misc_feature (53)..(54): n is a, c, g, or t
tttttttaagcagtggtatcaacgcagagtacnnggagtgttnnacgtgtagnntttttttttttttttttttttttttttttt

SEQ ID NO: 7860 - DNA, 84 bp, Artificial
  Barcode component
  misc_feature (33)..(34): n is a, c, g, or t
  misc_feature (43)..(44): n is a, c, g, or t
  misc_feature (53)..(54): n is a, c, g, or t
tttttttaagcagtggtatcaacgcagagtacnnggagtgttnnactacaggnntttttttttttttttttttttttttttttt

SEQ ID NO: 7861 - DNA, 84 bp, Artificial
  Barcode component
  misc_feature (33)..(34): n is a, c, g, or t
  misc_feature (43)..(44): n is a, c, g, or t
  misc_feature (53)..(54): n is a, c, g, or t
tttttttaagcagtggtatcaacgcagagtacnnggagtgttnntacaggtcnntttttttttttttttttttttttttttttt

SEQ ID NO: 7862 - DNA, 84 bp, Artificial
  Barcode component
  misc_feature (33)..(34): n is a, c, g, or t
  misc_feature (43)..(44): n is a, c, g, or t
  misc_feature (53)..(54): n is a, c, g, or t
tttttttaagcagtggtatcaacgcagagtacnnggagtgttnnctcacatgnntttttttttttttttttttttttttttttt

SEQ ID NO: 7863 - DNA, 84 bp, Artificial
  Barcode component
  misc_feature (33)..(34): n is a, c, g, or t
  misc_feature (43)..(44): n is a, c, g, or t
  misc_feature (53)..(54): n is a, c, g, or t
tttttttaagcagtggtatcaacgcagagtacnnggagtgttnnactaggagnntttttttttttttttttttttttttttttt

SEQ ID NO: 7864 - DNA, 84 bp, Artificial
  Barcode component
  misc_feature (33)..(34): n is a, c, g, or t
  misc_feature (43)..(44): n is a, c, g, or t
  misc_feature (53)..(54): n is a, c, g, or t
tttttttaagcagtggtatcaacgcagagtacnnggagtgttnnccatagganntttttttttttttttttttttttttttttt

SEQ ID NO: 7865 - DNA, 84 bp, Artificial
  Barcode component
  misc_feature (33)..(34): n is a, c, g, or t
  misc_feature (43)..(44): n is a, c, g, or t
  misc_feature (53)..(54): n is a, c, g, or t
tttttttaagcagtggtatcaacgcagagtacnnggagtgttnnggagaatcnntttttttttttttttttttttttttttttt

SEQ ID NO: 7866 - DNA, 84 bp, Artificial
  Barcode component
  misc_feature (33)..(34): n is a, c, g, or t
  misc_feature (43)..(44): n is a, c, g, or t
  misc_feature (53)..(54): n is a, c, g, or t
tttttttaagcagtggtatcaacgcagagtacnnggagtgttnngccaagaanntttttttttttttttttttttttttttttt

SEQ ID NO: 7867 - DNA, 84 bp, Artificial
  Barcode component
  misc_feature (33)..(34): n is a, c, g, or t
  misc_feature (43)..(44): n is a, c, g, or t
  misc_feature (53)..(54): n is a, c, g, or t
tttttttaagcagtggtatcaacgcagagtacnnggagtgttnnaaggcaagnntttttttttttttttttttttttttttttt

SEQ ID NO: 7868 - DNA, 84 bp, Artificial
  Barcode component
  misc_feature (33)..(34): n is a, c, g, or t
  misc_feature (43)..(44): n is a, c, g, or t
  misc_feature (53)..(54): n is a, c, g, or t
tttttttaagcagtggtatcaacgcagagtacnnggagtgttnnaatgtcgcnntttttttttttttttttttttttttttttt

SEQ ID NO: 7869 - DNA, 84 bp, Artificial
  Barcode component
  misc_feature (33)..(34): n is a, c, g, or t
  misc_feature (43)..(44): n is a, c, g, or t
  misc_feature (53)..(54): n is a, c, g, or t
tttttttaagcagtggtatcaacgcagagtacnnggagtgttnnatggaaccnntttttttttttttttttttttttttttttt

SEQ ID NO: 7870 - DNA, 84 bp, Artificial
  Barcode component
  misc_feature (33)..(34): n is a, c, g, or t
  misc_feature (43)..(44): n is a, c, g, or t
  misc_feature (53)..(54): n is a, c, g, or t
tttttttaagcagtggtatcaacgcagagtacnnggagtgttnnagaggcatnntttttttttttttttttttttttttttttt

SEQ ID NO: 7871 - DNA, 84 bp, Artificial
  Barcode component
  misc_feature (33)..(34): n is a, c, g, or t
  misc_feature (43)..(44): n is a, c, g, or t
  misc_feature (53)..(54): n is a, c, g, or t
tttttttaagcagtggtatcaacgcagagtacnnggagtgttnntgcatagcnntttttttttttttttttttttttttttttt

SEQ ID NO: 7872 - DNA, 84 bp, Artificial
  Barcode component
  misc_feature (33)..(34): n is a, c, g, or t
  misc_feature (43)..(44): n is a, c, g, or t
  misc_feature (53)..(54): n is a, c, g, or t
tttttttaagcagtggtatcaacgcagagtacnnggagtgttnnctaacgganntttttttttttttttttttttttttttttt

SEQ ID NO: 7873 - DNA, 84 bp, Artificial
  Barcode component
  misc_feature (33)..(34): n is a, c, g, or t
  misc_feature (43)..(44): n is a, c, g, or t
  misc_feature (53)..(54): n is a, c, g, or t
tttttttaagcagtggtatcaacgcagagtacnnggagtgttnntatcgaggnntttttttttttttttttttttttttttttt

SEQ ID NO: 7874 - DNA, 84 bp, Artificial
  Barcode component
  misc_feature (33)..(34): n is a, c, g, or t
  misc_feature (43)..(44): n is a, c, g, or t
  misc_feature (53)..(54): n is a, c, g, or t
tttttttaagcagtggtatcaacgcagagtacnnggagtgttnncatagcctnntttttttttttttttttttttttttttttt

SEQ ID NO: 7875 - DNA, 84 bp, Artificial
  Barcode component
  misc_feature (33)..(34): n is a, c, g, or t
  misc_feature (43)..(44): n is a, c, g, or t
  misc_feature (53)..(54): n is a, c, g, or t
tttttttaagcagtggtatcaacgcagagtacnnggagtgttnnatcgagacnntttttttttttttttttttttttttttttt

SEQ ID NO: 7876 - DNA, 84 bp, Artificial
  Barcode component
  misc_feature (33)..(34): n is a, c, g, or t
  misc_feature (43)..(44): n is a, c, g, or t
  misc_feature (53)..(54): n is a, c, g, or t
tttttttaagcagtggtatcaacgcagagtacnnggagtgttnnggaagagtnntttttttttttttttttttttttttttttt

SEQ ID NO: 7877 - DNA, 84 bp, Artificial
  Barcode component
  misc_feature (33)..(34): n is a, c, g, or t
  misc_feature (43)..(44): n is a, c, g, or t
  misc_feature (53)..(54): n is a, c, g, or t
tttttttaagcagtggtatcaacgcagagtacnnggagtgttnnccaagtagnntttttttttttttttttttttttttttttt

SEQ ID NO: 7878 - DNA, 84 bp, Artificial
  Barcode component
  misc_feature (33)..(34): n is a, c, g, or t
  misc_feature (43)..(44): n is a, c, g, or t
  misc_feature (53)..(54): n is a, c, g, or t
tttttttaagcagtggtatcaacgcagagtacnnggagtgttnnctgaacagnntttttttttttttttttttttttttttttt

SEQ ID NO: 7879 - DNA, 84 bp, Artificial
  Barcode component
  misc_feature (33)..(34): n is a, c, g, or t
  misc_feature (43)..(44): n is a, c, g, or t
  misc_feature (53)..(54): n is a, c, g, or t
tttttttaagcagtggtatcaacgcagagtacnnggagtgttnngtaggttcnntttttttttttttttttttttttttttttt

SEQ ID NO: 7880 - DNA, 84 bp, Artificial
  Barcode component
  misc_feature (33)..(34): n is a, c, g, or t
  misc_feature (43)..(44): n is a, c, g, or t
  misc_feature (53)..(54): n is a, c, g, or t
tttttttaagcagtggtatcaacgcagagtacnnggagtgttnngtatggacnntttttttttttttttttttttttttttttt

SEQ ID NO: 7881 - DNA, 84 bp, Artificial
  Barcode component
  misc_feature (33)..(34): n is a, c, g, or t
  misc_feature (43)..(44): n is a, c, g, or t
  misc_feature (53)..(54): n is a, c, g, or t
tttttttaagcagtggtatcaacgcagagtacnnggagtgttnntcgcaacanntttttttttttttttttttttttttttttt

SEQ ID NO: 7882 - DNA, 84 bp, Artificial
  Barcode component
  misc_feature (33)..(34): n is a, c, g, or t
  misc_feature (43)..(44): n is a, c, g, or t
  misc_feature (53)..(54): n is a, c, g, or t
tttttttaagcagtggtatcaacgcagagtacnnggagtgttnnccgctaatnntttttttttttttttttttttttttttttt

SEQ ID NO: 7883 - DNA, 84 bp, Artificial
  Barcode component
  misc_feature (33)..(34): n is a, c, g, or t
  misc_feature (43)..(44): n is a, c, g, or t
  misc_feature (53)..(54): n is a, c, g, or t
tttttttaagcagtggtatcaacgcagagtacnnggagtgttnngattcgcanntttttttttttttttttttttttttttttt

SEQ ID NO: 7884 - DNA, 84 bp, Artificial
  Barcode component
  misc_feature (33)..(34): n is a, c, g, or t
  misc_feature (43)..(44): n is a, c, g, or t
  misc_feature (53)..(54): n is a, c, g, or t
tttttttaagcagtggtatcaacgcagagtacnnggagtgttnncgatggaanntttttttttttttttttttttttttttttt

SEQ ID NO: 7885 - DNA, 84 bp, Artificial
  Barcode component
  misc_feature (33)..(34): n is a, c, g, or t
  misc_feature (43)..(44): n is a, c, g, or t
  misc_feature (53)..(54): n is a, c, g, or t
tttttttaagcagtggtatcaacgcagagtacnnggagtgttnnagcaagganntttttttttttttttttttttttttttttt

SEQ ID NO: 7886 - DNA, 84 bp, Artificial
  Barcode component
  misc_feature (33)..(34): n is a, c, g, or t
  misc_feature (43)..(44): n is a, c, g, or t
  misc_feature (53)..(54): n is a, c, g, or t
tttttttaagcagtggtatcaacgcagagtacnnggagtgttnncgtagcaanntttttttttttttttttttttttttttttt

SEQ ID NO: 7887 - DNA, 84 bp, Artificial
  Barcode component
  misc_feature (33)..(34): n is a, c, g, or t
  misc_feature (43)..(44): n is a, c, g, or t
  misc_feature (53)..(54): n is a, c, g, or t
tttttttaagcagtggtatcaacgcagagtacnnggagtgttnntggcagtanntttttttttttttttttttttttttttttt

SEQ ID NO: 7888 - DNA, 84 bp, Artificial
  Barcode component
  misc_feature (33)..(34): n is a, c, g, or t
  misc_feature (43)..(44): n is a, c, g, or t
  misc_feature (53)..(54): n is a, c, g, or t
tttttttaagcagtggtatcaacgcagagtacnnggagtgttnncggtagttnntttttttttttttttttttttttttttttt

SEQ ID NO: 7889 - DNA, 84 bp, Artificial
  Barcode component
  misc_feature (33)..(34): n is a, c, g, or t
  misc_feature (43)..(44): n is a, c, g, or t
  misc_feature (53)..(54): n is a, c, g, or t
tttttttaagcagtggtatcaacgcagagtacnnggagtgttnntgacttcgnntttttttttttttttttttttttttttttt

SEQ ID NO: 7890 - DNA, 84 bp, Artificial
  Barcode component
  misc_feature (33)..(34): n is a, c, g, or t
  misc_feature (43)..(44): n is a, c, g, or t
  misc_feature (53)..(54): n is a, c, g, or t
tttttttaagcagtggtatcaacgcagagtacnnggagtgttnngagtgcaanntttttttttttttttttttttttttttttt

SEQ ID NO: 7891 - DNA, 84 bp, Artificial
  Barcode component
  misc_feature (33)..(34): n is a, c, g, or t
  misc_feature (43)..(44): n is a, c, g, or t
  misc_feature (53)..(54): n is a, c, g, or t
tttttttaagcagtggtatcaacgcagagtacnnggagtgttnnacggtaacnntttttttttttttttttttttttttttttt

SEQ ID NO: 7892 - DNA, 84 bp, Artificial
  Barcode component
  misc_feature (33)..(34): n is a, c, g, or t
  misc_feature (43)..(44): n is a, c, g, or t
  misc_feature (53)..(54): n is a, c, g, or t
tttttttaagcagtggtatcaacgcagagtacnnggagtgttnnaagtggtgnntttttttttttttttttttttttttttttt

SEQ ID NO: 7893 - DNA, 84 bp, Artificial
  Barcode component
  misc_feature (33)..(34): n is a, c, g, or t
  misc_feature (43)..(44): n is a, c, g, or t
  misc_feature (53)..(54): n is a, c, g, or t
tttttttaagcagtggtatcaacgcagagtacnnggagtgttnnggagacaanntttttttttttttttttttttttttttttt

SEQ ID NO: 7894 - DNA, 84 bp, Artificial
  Barcode component
  misc_feature (33)..(34): n is a, c, g, or t
  misc_feature (43)..(44): n is a, c, g, or t
  misc_feature (53)..(54): n is a, c, g, or t
tttttttaagcagtggtatcaacgcagagtacnnggagtgttnntcaaggacnntttttttttttttttttttttttttttttt

SEQ ID NO: 7895 - DNA, 84 bp, Artificial
  Barcode component
  misc_feature (33)..(34): n is a, c, g, or t
  misc_feature (43)..(44): n is a, c, g, or t
  misc_feature (53)..(54): n is a, c, g, or t
tttttttaagcagtggtatcaacgcagagtacnnggagtgttnnaagagagcnntttttttttttttttttttttttttttttt

SEQ ID NO: 7896 - DNA, 84 bp, Artificial
  Barcode component
  misc_feature (33)..(34): n is a, c, g, or t
  misc_feature (43)..(44): n is a, c, g, or t
  misc_feature (53)..(54): n is a, c, g, or t
tttttttaagcagtggtatcaacgcagagtacnnggagtgttnncgagagatnntttttttttttttttttttttttttttttt

SEQ ID NO: 7897 - DNA, 84 bp, Artificial
  Barcode component
  misc_feature (33)..(34): n is a, c, g, or t
  misc_feature (43)..(44): n is a, c, g, or t
  misc_feature (53)..(54): n is a, c, g, or t
tttttttaagcagtggtatcaacgcagagtacnnggagtgttnnacagatggnntttttttttttttttttttttttttttttt

SEQ ID NO: 7898 - DNA, 84 bp, Artificial
  Barcode component
  misc_feature (33)..(34): n is a, c, g, or t
  misc_feature (43)..(44): n is a, c, g, or t
  misc_feature (53)..(54): n is a, c, g, or t
tttttttaagcagtggtatcaacgcagagtacnnggagtgttnnaggagtcanntttttttttttttttttttttttttttttt

SEQ ID NO: 7899 - DNA, 84 bp, Artificial
  Barcode component
  misc_feature (33)..(34): n is a, c, g, or t
  misc_feature (43)..(44): n is a, c, g, or t
  misc_feature (53)..(54): n is a, c, g, or t
tttttttaagcagtggtatcaacgcagagtacnnggagtgttnncgtgttacnntttttttttttttttttttttttttttttt

SEQ ID NO: 7900 - DNA, 84 bp, Artificial
  Barcode component
  misc_feature (33)..(34): n is a, c, g, or t
  misc_feature (43)..(44): n is a, c, g, or t
  misc_feature (53)..(54): n is a, c, g, or t
tttttttaagcagtggtatcaacgcagagtacnnggagtgttnntagtgtgcnntttttttttttttttttttttttttttttt

SEQ ID NO: 7901 - DNA, 84 bp, Artificial
  Barcode component
  misc_feature (33)..(34): n is a, c, g, or t
  misc_feature (43)..(44): n is a, c, g, or t
  misc_feature (53)..(54): n is a, c, g, or t
tttttttaagcagtggtatcaacgcagagtacnnggagtgttnnctcatgacnntttttttttttttttttttttttttttttt

SEQ ID NO: 7902 - DNA, 84 bp, Artificial
  Barcode component
  misc_feature (33)..(34): n is a, c, g, or t
  misc_feature (43)..(44): n is a, c, g, or t
  misc_feature (53)..(54): n is a, c, g, or t
tttttttaagcagtggtatcaacgcagagtacnnggagtgttnngtatccagnntttttttttttttttttttttttttttttt

SEQ ID NO: 7903 - DNA, 84 bp, Artificial
  Barcode component
  misc_feature (33)..(34): n is a, c, g, or t
  misc_feature (43)..(44): n is a, c, g, or t
  misc_feature (53)..(54): n is a, c, g, or t
tttttttaagcagtggtatcaacgcagagtacnnggagtgttnnacgcctatnntttttttttttttttttttttttttttttt

SEQ ID NO: 7904 - DNA, 84 bp, Artificial
  Barcode component
  misc_feature (33)..(34): n is a, c, g, or t
  misc_feature (43)..(44): n is a, c, g, or t
  misc_feature (53)..(54): n is a, c, g, or t
tttttttaagcagtggtatcaacgcagagtacnnggagtgttnnaacgacctnntttttttttttttttttttttttttttttt

SEQ ID NO: 7905 - DNA, 84 bp, Artificial
  Barcode component
  misc_feature (33)..(34): n is a, c, g, or t
  misc_feature (43)..(44): n is a, c, g, or t
  misc_feature (53)..(54): n is a, c, g, or t
tttttttaagcagtggtatcaacgcagagtacnnggagtgttnnatcaggctnntttttttttttttttttttttttttttttt

SEQ ID NO: 7906 - DNA, 84 bp, Artificial
  Barcode component
  misc_feature (33)..(34): n is a, c, g, or t
  misc_feature (43)..(44): n is a, c, g, or t
  misc_feature (53)..(54): n is a, c, g, or t
tttttttaagcagtggtatcaacgcagagtacnnggagtgttnncaagttcgnntttttttttttttttttttttttttttttt

SEQ ID NO: 7907 - DNA, 84 bp, Artificial
  Barcode component
  misc_feature (33)..(34): n is a, c, g, or t
  misc_feature (43)..(44): n is a, c, g, or t
  misc_feature (53)..(54): n is a, c, g, or t
tttttttaagcagtggtatcaacgcagagtacnnggagtgttnntagccaganntttttttttttttttttttttttttttttt

SEQ ID NO: 7908 - DNA, 84 bp, Artificial
  Barcode component
  misc_feature (33)..(34): n is a, c, g, or t
  misc_feature (43)..(44): n is a, c, g, or t
  misc_feature (53)..(54): n is a, c, g, or t
tttttttaagcagtggtatcaacgcagagtacnnggagtgttnncaatcacgnntttttttttttttttttttttttttttttt

SEQ ID NO: 7909 - DNA, 84 bp, Artificial
  Barcode component
  misc_feature (33)..(34): n is a, c, g, or t
  misc_feature (43)..(44): n is a, c, g, or t
  misc_feature (53)..(54): n is a, c, g, or t
tttttttaagcagtggtatcaacgcagagtacnnggagtgttnngcaacaagnntttttttttttttttttttttttttttttt

SEQ ID NO: 7910 - DNA, 84 bp, Artificial
  Barcode component
  misc_feature (33)..(34): n is a, c, g, or t
  misc_feature (43)..(44): n is a, c, g, or t
  misc_feature (53)..(54): n is a, c, g, or t
tttttttaagcagtggtatcaacgcagagtacnnggagtgttnncacgacaanntttttttttttttttttttttttttttttt

SEQ ID NO: 7911 - DNA, 84 bp, Artificial
  Barcode component
  misc_feature (33)..(34): n is a, c, g, or t
  misc_feature (43)..(44): n is a, c, g, or t
  misc_feature (53)..(54): n is a, c, g, or t
tttttttaagcagtggtatcaacgcagagtacnnggagtgttnntacggaganntttttttttttttttttttttttttttttt

SEQ ID NO: 7912 - DNA, 84 bp, Artificial
  Barcode component
  misc_feature (33)..(34): n is a, c, g, or t
  misc_feature (43)..(44): n is a, c, g, or t
  misc_feature (53)..(54): n is a, c, g, or t
tttttttaagcagtggtatcaacgcagagtacnnggagtgttnncgacaaganntttttttttttttttttttttttttttttt

SEQ ID NO: 7913 - DNA, 84 bp, Artificial
  Barcode component
  misc_feature (33)..(34): n is a, c, g, or t
  misc_feature (43)..(44): n is a, c, g, or t
  misc_feature (53)..(54): n is a, c, g, or t
tttttttaagcagtggtatcaacgcagagtacnnggagtgttnncgaagtganntttttttttttttttttttttttttttttt

SEQ ID NO: 7914 - DNA, 84 bp, Artificial
  Barcode component
  misc_feature (33)..(34): n is a, c, g, or t
  misc_feature (43)..(44): n is a, c, g, or t
  misc_feature (53)..(54): n is a, c, g, or t
tttttttaagcagtggtatcaacgcagagtacnnggagtgttnnagctggtanntttttttttttttttttttttttttttttt

SEQ ID NO: 7915 - DNA, 84 bp, Artificial
  Barcode component
  misc_feature (33)..(34): n is a, c, g, or t
  misc_feature (43)..(44): n is a, c, g, or t
  misc_feature (53)..(54): n is a, c, g, or t
tttttttaagcagtggtatcaacgcagagtacnnggagtgttnnaactaggcnntttttttttttttttttttttttttttttt

SEQ ID NO: 7916 - DNA, 84 bp, Artificial
  Barcode component
  misc_feature (33)..(34): n is a, c, g, or t
  misc_feature (43)..(44): n is a, c, g, or t
  misc_feature (53)..(54): n is a, c, g, or t
tttttttaagcagtggtatcaacgcagagtacnnggagtgttnncagcaagtnntttttttttttttttttttttttttttttt

SEQ ID NO: 7917 - DNA, 84 bp, Artificial
  Barcode component
  misc_feature (33)..(34): n is a, c, g, or t
  misc_feature (43)..(44): n is a, c, g, or t
  misc_feature (53)..(54): n is a, c, g, or t
tttttttaagcagtggtatcaacgcagagtacnnggagtgttnnacgaggtanntttttttttttttttttttttttttttttt

SEQ ID NO: 7918 - DNA, 84 bp, Artificial
  Barcode component
  misc_feature (33)..(34): n is a, c, g, or t
  misc_feature (43)..(44): n is a, c, g, or t
  misc_feature (53)..(54): n is a, c, g, or t
tttttttaagcagtggtatcaacgcagagtacnnggagtgttnncatcttccnntttttttttttttttttttttttttttttt

SEQ ID NO: 7919 - DNA, 84 bp, Artificial
  Barcode component
  misc_feature (33)..(34): n is a, c, g, or t
  misc_feature (43)..(44): n is a, c, g, or t
  misc_feature (53)..(54): n is a, c, g, or t
tttttttaagcagtggtatcaacgcagagtacnnggagtgttnncctgaatcnntttttttttttttttttttttttttttttt

SEQ ID NO: 7920 - DNA, 84 bp, Artificial
  Barcode component
  misc_feature (33)..(34): n is a, c, g, or t
  misc_feature (43)..(44): n is a, c, g, or t
  misc_feature (53)..(54): n is a, c, g, or t
tttttttaagcagtggtatcaacgcagagtacnnggagtgttnntgcagactnntttttttttttttttttttttttttttttt

SEQ ID NO: 7921 - DNA, 84 bp, Artificial
  Barcode component
  misc_feature (33)..(34): n is a, c, g, or t
  misc_feature (43)..(44): n is a, c, g, or t
  misc_feature (53)..(54): n is a, c, g, or t
tttttttaagcagtggtatcaacgcagagtacnnggagtgttnnagatgtggnntttttttttttttttttttttttttttttt

SEQ ID NO: 7922 - DNA, 84 bp, Artificial
  Barcode component
  misc_feature (33)..(34): n is a, c, g, or t
  misc_feature (43)..(44): n is a, c, g, or t
  misc_feature (53)..(54): n is a, c, g, or t
tttttttaagcagtggtatcaacgcagagtacnnggagtgttnnagttcgacnntttttttttttttttttttttttttttttt

SEQ ID NO: 7923 - DNA, 84 bp, Artificial
  Barcode component
  misc_feature (33)..(34): n is a, c, g, or t
  misc_feature (43)..(44): n is a, c, g, or t
  misc_feature (53)..(54): n is a, c, g, or t
tttttttaagcagtggtatcaacgcagagtacnnggagtgttnnacaacctcnntttttttttttttttttttttttttttttt

SEQ ID NO: 7924 - DNA, 84 bp, Artificial
  Barcode component
  misc_feature (33)..(34): n is a, c, g, or t
  misc_feature (43)..(44): n is a, c, g, or t
  misc_feature (53)..(54): n is a, c, g, or t
tttttttaagcagtggtatcaacgcagagtacnnggagtgttnncatggtagnntttttttttttttttttttttttttttttt

SEQ ID NO: 7925 - DNA, 84 bp, Artificial
  Barcode component
  misc_feature (33)..(34): n is a, c, g, or t
  misc_feature (43)..(44): n is a, c, g, or t
  misc_feature (53)..(54): n is a, c, g, or t
tttttttaagcagtggtatcaacgcagagtacnnggagtgttnncgtatctcnntttttttttttttttttttttttttttttt

SEQ ID NO: 7926 - DNA, 84 bp, Artificial
  Barcode component
  misc_feature (33)..(34): n is a, c, g, or t
  misc_feature (43)..(44): n is a, c, g, or t
  misc_feature (53)..(54): n is a, c, g, or t
tttttttaagcagtggtatcaacgcagagtacnnggagtgttnncctagttcnntttttttttttttttttttttttttttttt

SEQ ID NO: 7927 - DNA, 84 bp, Artificial
  Barcode component
  misc_feature (33)..(34): n is a, c, g, or t
  misc_feature (43)..(44): n is a, c, g, or t
  misc_feature (53)..(54): n is a, c, g, or t
tttttttaagcagtggtatcaacgcagagtacnnggagtgttnncaagagtcnntttttttttttttttttttttttttttttt

SEQ ID NO: 7928 - DNA, 84 bp, Artificial
  Barcode component
  misc_feature (33)..(34): n is a, c, g, or t
  misc_feature (43)..(44): n is a, c, g, or t
  misc_feature (53)..(54): n is a, c, g, or t
tttttttaagcagtggtatcaacgcagagtacnngaagatccnnaatcggcanntttttttttttttttttttttttttttttt

SEQ ID NO: 7929 - DNA, 84 bp, Artificial
  Barcode component
  misc_feature (33)..(34): n is a, c, g, or t
  misc_feature (43)..(44): n is a, c, g, or t
  misc_feature (53)..(54): n is a, c, g, or t
tttttttaagcagtggtatcaacgcagagtacnngaagatccnntacggcatnntttttttttttttttttttttttttttttt

SEQ ID NO: 7930 - DNA, 84 bp, Artificial
  Barcode component
  misc_feature (33)..(34): n is a, c, g, or t
  misc_feature (43)..(44): n is a, c, g, or t
  misc_feature (53)..(54): n is a, c, g, or t
tttttttaagcagtggtatcaacgcagagtacnngaagatccnnttggatcgnntttttttttttttttttttttttttttttt

SEQ ID NO: 7931 - DNA, 84 bp, Artificial
  Barcode component
  misc_feature (33)..(34): n is a, c, g, or t
  misc_feature (43)..(44): n is a, c, g, or t
  misc_feature (53)..(54): n is a, c, g, or t
tttttttaagcagtggtatcaacgcagagtacnngaagatccnntggaacganntttttttttttttttttttttttttttttt

SEQ ID NO: 7932 - DNA, 84 bp, Artificial
  Barcode component
  misc_feature (33)..(34): n is a, c, g, or t
  misc_feature (43)..(44): n is a, c, g, or t
  misc_feature (53)..(54): n is a, c, g, or t
tttttttaagcagtggtatcaacgcagagtacnngaagatccnnggcaatcanntttttttttttttttttttttttttttttt

SEQ ID NO: 7933 - DNA, 84 bp, Artificial
  Barcode component
  misc_feature (33)..(34): n is a, c, g, or t
  misc_feature (43)..(44): n is a, c, g, or t
  misc_feature (53)..(54): n is a, c, g, or t
tttttttaagcagtggtatcaacgcagagtacnngaagatccnngaatccganntttttttttttttttttttttttttttttt

SEQ ID NO: 7934 - DNA, 84 bp, Artificial
  Barcode component
  misc_feature (33)..(34): n is a, c, g, or t
  misc_feature (43)..(44): n is a, c, g, or t
  misc_feature (53)..(54): n is a, c, g, or t
tttttttaagcagtggtatcaacgcagagtacnngaagatccnnttacggtgnntttttttttttttttttttttttttttttt

SEQ ID NO: 7935 - DNA, 84 bp, Artificial
  Barcode component
  misc_feature (33)..(34): n is a, c, g, or t
  misc_feature (43)..(44): n is a, c, g, or t
  misc_feature (53)..(54): n is a, c, g, or t
tttttttaagcagtggtatcaacgcagagtacnngaagatccnncatatcggnntttttttttttttttttttttttttttttt

SEQ ID NO: 7936 - DNA, 84 bp, Artificial
  Barcode component
  misc_feature (33)..(34): n is a, c, g, or t
  misc_feature (43)..(44): n is a, c, g, or t
  misc_feature (53)..(54): n is a, c, g, or t
tttttttaagcagtggtatcaacgcagagtacnngaagatccnncttcggtanntttttttttttttttttttttttttttttt

SEQ ID NO: 7937 - DNA, 84 bp, Artificial
  Barcode component
  misc_feature (33)..(34): n is a, c, g, or t
  misc_feature (43)..(44): n is a, c, g, or t
  misc_feature (53)..(54): n is a, c, g, or t
tttttttaagcagtggtatcaacgcagagtacnngaagatccnntcctaacgnntttttttttttttttttttttttttttttt

SEQ ID NO: 7938 - DNA, 84 bp, Artificial
  Barcode component
  misc_feature (33)..(34): n is a, c, g, or t
  misc_feature (43)..(44): n is a, c, g, or t
  misc_feature (53)..(54): n is a, c, g, or t
tttttttaagcagtggtatcaacgcagagtacnngaagatccnngtaagccanntttttttttttttttttttttttttttttt

SEQ ID NO: 7939 - DNA, 84 bp, Artificial
  Barcode component
  misc_feature (33)..(34): n is a, c, g, or t
  misc_feature (43)..(44): n is a, c, g, or t
  misc_feature (53)..(54): n is a, c, g, or t
tttttttaagcagtggtatcaacgcagagtacnngaagatccnntaaggtggnntttttttttttttttttttttttttttttt

SEQ ID NO: 7940 - DNA, 84 bp, Artificial
  Barcode component
  misc_feature (33)..(34): n is a, c, g, or t
  misc_feature (43)..(44): n is a, c, g, or t
  misc_feature (53)..(54): n is a, c, g, or t
tttttttaagcagtggtatcaacgcagagtacnngaagatccnnggtaagctnntttttttttttttttttttttttttttttt

SEQ ID NO: 7941 - DNA, 84 bp, Artificial
  Barcode component
  misc_feature (33)..(34): n is a, c, g, or t
  misc_feature (43)..(44): n is a, c, g, or t
  misc_feature (53)..(54): n is a, c, g, or t
tttttttaagcagtggtatcaacgcagagtacnngaagatccnntgtgtcganntttttttttttttttttttttttttttttt

SEQ ID NO: 7942 - DNA, 84 bp, Artificial
  Barcode component
  misc_feature (33)..(34): n is a, c, g, or t
  misc_feature (43)..(44): n is a, c, g, or t
  misc_feature (53)..(54): n is a, c, g, or t
tttttttaagcagtggtatcaacgcagagtacnngaagatccnngagcatganntttttttttttttttttttttttttttttt

SEQ ID NO: 7943 - DNA, 84 bp, Artificial
  Barcode component
  misc_feature (33)..(34): n is a, c, g, or t
  misc_feature (43)..(44): n is a, c, g, or t
  misc_feature (53)..(54): n is a, c, g, or t
tttttttaagcagtggtatcaacgcagagtacnngaagatccnntcgaagtcnntttttttttttttttttttttttttttttt

SEQ ID NO: 7944 - DNA, 84 bp, Artificial
  Barcode component
  misc_feature (33)..(34): n is a, c, g, or t
  misc_feature (43)..(44): n is a, c, g, or t
  misc_feature (53)..(54): n is a, c, g, or t
tttttttaagcagtggtatcaacgcagagtacnngaagatccnnggtgaacanntttttttttttttttttttttttttttttt

SEQ ID NO: 7945 - DNA, 84 bp, Artificial
  Barcode component
  misc_feature (33)..(34): n is a, c, g, or t
  misc_feature (43)..(44): n is a, c, g, or t
  misc_feature (53)..(54): n is a, c, g, or t
tttttttaagcagtggtatcaacgcagagtacnngaagatccnnacatgcacnntttttttttttttttttttttttttttttt

SEQ ID NO: 7946 - DNA, 84 bp, Artificial
  Barcode component
  misc_feature (33)..(34): n is a, c, g, or t
  misc_feature (43)..(44): n is a, c, g, or t
  misc_feature (53)..(54): n is a, c, g, or t
tttttttaagcagtggtatcaacgcagagtacnngaagatccnnccaacagtnntttttttttttttttttttttttttttttt

SEQ ID NO: 7947 - DNA, 84 bp, Artificial
  Barcode component
  misc_feature (33)..(34): n is a, c, g, or t
  misc_feature (43)..(44): n is a, c, g, or t
  misc_feature (53)..(54): n is a, c, g, or t
tttttttaagcagtggtatcaacgcagagtacnngaagatccnnagaacagcnntttttttttttttttttttttttttttttt

SEQ ID NO: 7948 - DNA, 84 bp, Artificial
  Barcode component
  misc_feature (33)..(34): n is a, c, g, or t
  misc_feature (43)..(44): n is a, c, g, or t
  misc_feature (53)..(54): n is a, c, g, or t
tttttttaagcagtggtatcaacgcagagtacnngaagatccnngaacacgtnntttttttttttttttttttttttttttttt

SEQ ID NO: 7949 - DNA, 84 bp, Artificial
  Barcode component
  misc_feature (33)..(34): n is a, c, g, or t
  misc_feature (43)..(44): n is a, c, g, or t
  misc_feature (53)..(54): n is a, c, g, or t
tttttttaagcagtggtatcaacgcagagtacnngaagatccnnggtcttcanntttttttttttttttttttttttttttttt

SEQ ID NO: 7950 - DNA, 84 bp, Artificial
  Barcode component
  misc_feature (33)..(34): n is a, c, g, or t
  misc_feature (43)..(44): n is a, c, g, or t
  misc_feature (53)..(54): n is a, c, g, or t
tttttttaagcagtggtatcaacgcagagtacnngaagatccnnaggttcagnntttttttttttttttttttttttttttttt

SEQ ID NO: 7951 - DNA, 84 bp, Artificial
  Barcode component
  misc_feature (33)..(34): n is a, c, g, or t
  misc_feature (43)..(44): n is a, c, g, or t
  misc_feature (53)..(54): n is a, c, g, or t
tttttttaagcagtggtatcaacgcagagtacnngaagatccnnctagagcanntttttttttttttttttttttttttttttt

SEQ ID NO: 7952 - DNA, 84 bp, Artificial
  Barcode component
  misc_feature (33)..(34): n is a, c, g, or t
  misc_feature (43)..(44): n is a, c, g, or t
  misc_feature (53)..(54): n is a, c, g, or t
tttttttaagcagtggtatcaacgcagagtacnngaagatccnncttctagcnntttttttttttttttttttttttttttttt

SEQ ID NO: 7953 - DNA, 84 bp, Artificial
  Barcode component
  misc_feature (33)..(34): n is a, c, g, or t
  misc_feature (43)..(44): n is a, c, g, or t
  misc_feature (53)..(54): n is a, c, g, or t
tttttttaagcagtggtatcaacgcagagtacnngaagatccnngagtaacgnntttttttttttttttttttttttttttttt

SEQ ID NO: 7954 - DNA, 84 bp, Artificial
  Barcode component
  misc_feature (33)..(34): n is a, c, g, or t
  misc_feature (43)..(44): n is a, c, g, or t
  misc_feature (53)..(54): n is a, c, g, or t
tttttttaagcagtggtatcaacgcagagtacnngaagatccnnctaagaggnntttttttttttttttttttttttttttttt

SEQ ID NO: 7955 - DNA, 84 bp, Artificial
  Barcode component
  misc_feature (33)..(34): n is a, c, g, or t
  misc_feature (43)..(44): n is a, c, g, or t
  misc_feature (53)..(54): n is a, c, g, or t
tttttttaagcagtggtatcaacgcagagtacnngaagatccnnacgtgtagnntttttttttttttttttttttttttttttt

SEQ ID NO: 7956 - DNA, 84 bp, Artificial
  Barcode component
  misc_feature (33)..(34): n is a, c, g, or t
  misc_feature (43)..(44): n is a, c, g, or t
  misc_feature (53)..(54): n is a, c, g, or t
tttttttaagcagtggtatcaacgcagagtacnngaagatccnnactacaggnntttttttttttttttttttttttttttttt

SEQ ID NO: 7957 - DNA, 84 bp, Artificial
  Barcode component
  misc_feature (33)..(34): n is a, c, g, or t
  misc_feature (43)..(44): n is a, c, g, or t
  misc_feature (53)..(54): n is a, c, g, or t
tttttttaagcagtggtatcaacgcagagtacnngaagatccnntacaggtcnntttttttttttttttttttttttttttttt

SEQ ID NO: 7958 - DNA, 84 bp, Artificial
  Barcode component
  misc_feature (33)..(34): n is a, c, g, or t
  misc_feature (43)..(44): n is a, c, g, or t
  misc_feature (53)..(54): n is a, c, g, or t
tttttttaagcagtggtatcaacgcagagtacnngaagatccnnctcacatgnntttttttttttttttttttttttttttttt

SEQ ID NO: 7959 - DNA, 84 bp, Artificial
  Barcode component
  misc_feature (33)..(34): n is a, c, g, or t
  misc_feature (43)..(44): n is a, c, g, or t
  misc_feature (53)..(54): n is a, c, g, or t
tttttttaagcagtggtatcaacgcagagtacnngaagatccnnactaggagnntttttttttttttttttttttttttttttt

SEQ ID NO: 7960 - DNA, 84 bp, Artificial
  Barcode component
  misc_feature (33)..(34): n is a, c, g, or t
  misc_feature (43)..(44): n is a, c, g, or t
  misc_feature (53)..(54): n is a, c, g, or t
tttttttaagcagtggtatcaacgcagagtacnngaagatccnnccatagganntttttttttttttttttttttttttttttt

SEQ ID NO: 7961 - DNA, 84 bp, Artificial
  Barcode component
  misc_feature (33)..(34): n is a, c, g, or t
  misc_feature (43)..(44): n is a, c, g, or t
  misc_feature (53)..(54): n is a, c, g, or t
tttttttaagcagtggtatcaacgcagagtacnngaagatccnnggagaatcnntttttttttttttttttttttttttttttt

SEQ ID NO: 7962 - DNA, 84 bp, Artificial
  Barcode component
  misc_feature (33)..(34): n is a, c, g, or t
  misc_feature (43)..(44): n is a, c, g, or t
  misc_feature (53)..(54): n is a, c, g, or t
tttttttaagcagtggtatcaacgcagagtacnngaagatccnngccaagaanntttttttttttttttttttttttttttttt

SEQ ID NO: 7963 - DNA, 84 bp, Artificial
  Barcode component
  misc_feature (33)..(34): n is a, c, g, or t
  misc_feature (43)..(44): n is a, c, g, or t
  misc_feature (53)..(54): n is a, c, g, or t
tttttttaagcagtggtatcaacgcagagtacnngaagatccnnaaggcaagnntttttttttttttttttttttttttttttt

SEQ ID NO: 7964 - DNA, 84 bp, Artificial
  Barcode component
  misc_feature (33)..(34): n is a, c, g, or t
  misc_feature (43)..(44): n is a, c, g, or t
  misc_feature (53)..(54): n is a, c, g, or t
tttttttaagcagtggtatcaacgcagagtacnngaagatccnnaatgtcgcnntttttttttttttttttttttttttttttt

SEQ ID NO: 7965 - DNA, 84 bp, Artificial
  Barcode component
  misc_feature (33)..(34): n is a, c, g, or t
  misc_feature (43)..(44): n is a, c, g, or t
  misc_feature (53)..(54): n is a, c, g, or t
tttttttaagcagtggtatcaacgcagagtacnngaagatccnnatggaaccnntttttttttttttttttttttttttttttt

SEQ ID NO: 7966 - DNA, 84 bp, Artificial
  Barcode component
  misc_feature (33)..(34): n is a, c, g, or t
  misc_feature (43)..(44): n is a, c, g, or t
  misc_feature (53)..(54): n is a, c, g, or t
tttttttaagcagtggtatcaacgcagagtacnngaagatccnnagaggcatnntttttttttttttttttttttttttttttt

SEQ ID NO: 7967 - DNA, 84 bp, Artificial
  Barcode component
  misc_feature (33)..(34): n is a, c, g, or t
  misc_feature (43)..(44): n is a, c, g, or t
  misc_feature (53)..(54): n is a, c, g, or t
tttttttaagcagtggtatcaacgcagagtacnngaagatccnntgcatagcnntttttttttttttttttttttttttttttt

SEQ ID NO: 7968 - DNA, 84 bp, Artificial
  Barcode component
  misc_feature (33)..(34): n is a, c, g, or t
  misc_feature (43)..(44): n is a, c, g, or t
  misc_feature (53)..(54): n is a, c, g, or t
tttttttaagcagtggtatcaacgcagagtacnngaagatccnnctaacgganntttttttttttttttttttttttttttttt

SEQ ID NO: 7969 - DNA, 84 bp, Artificial
  Barcode component
  misc_feature (33)..(34): n is a, c, g, or t
  misc_feature (43)..(44): n is a, c, g, or t
  misc_feature (53)..(54): n is a, c, g, or t
tttttttaagcagtggtatcaacgcagagtacnngaagatccnntatcgaggnntttttttttttttttttttttttttttttt

SEQ ID NO: 7970 - DNA, 84 bp, Artificial
  Barcode component
  misc_feature (33)..(34): n is a, c, g, or t
  misc_feature (43)..(44): n is a, c, g, or t
  misc_feature (53)..(54): n is a, c, g, or t
tttttttaagcagtggtatcaacgcagagtacnngaagatccnncatagcctnntttttttttttttttttttttttttttttt

SEQ ID NO: 7971 - DNA, 84 bp, Artificial
  Barcode component
  misc_feature (33)..(34): n is a, c, g, or t
  misc_feature (43)..(44): n is a, c, g, or t
  misc_feature (53)..(54): n is a, c, g, or t
tttttttaagcagtggtatcaacgcagagtacnngaagatccnnatcgagacnntttttttttttttttttttttttttttttt

SEQ ID NO: 7972 - DNA, 84 bp, Artificial
  Barcode component
  misc_feature (33)..(34): n is a, c, g, or t
  misc_feature (43)..(44): n is a, c, g, or t
  misc_feature (53)..(54): n is a, c, g, or t
tttttttaagcagtggtatcaacgcagagtacnngaagatccnnggaagagtnntttttttttttttttttttttttttttttt

SEQ ID NO: 7973 - DNA, 84 bp, Artificial
  Barcode component
  misc_feature (33)..(34): n is a, c, g, or t
  misc_feature (43)..(44): n is a, c, g, or t
  misc_feature (53)..(54): n is a, c, g, or t
tttttttaagcagtggtatcaacgcagagtacnngaagatccnnccaagtagnntttttttttttttttttttttttttttttt

SEQ ID NO: 7974 - DNA, 84 bp, Artificial
  Barcode component
  misc_feature (33)..(34): n is a, c, g, or t
  misc_feature (43)..(44): n is a, c, g, or t
  misc_feature (53)..(54): n is a, c, g, or t
tttttttaagcagtggtatcaacgcagagtacnngaagatccnnctgaacagnntttttttttttttttttttttttttttttt

SEQ ID NO: 7975 - DNA, 84 bp, Artificial
  Barcode component
  misc_feature (33)..(34): n is a, c, g, or t
  misc_feature (43)..(44): n is a, c, g, or t
  misc_feature (53)..(54): n is a, c, g, or t
tttttttaagcagtggtatcaacgcagagtacnngaagatccnngtaggttcnntttttttttttttttttttttttttttttt

SEQ ID NO: 7976 - DNA, 84 bp, Artificial
  Barcode component
  misc_feature (33)..(34): n is a, c, g, or t
  misc_feature (43)..(44): n is a, c, g, or t
  misc_feature (53)..(54): n is a, c, g, or t
tttttttaagcagtggtatcaacgcagagtacnngaagatccnngtatggacnntttttttttttttttttttttttttttttt

SEQ ID NO: 7977 - DNA, 84 bp, Artificial
  Barcode component
  misc_feature (33)..(34): n is a, c, g, or t
  misc_feature (43)..(44): n is a, c, g, or t
  misc_feature (53)..(54): n is a, c, g, or t
tttttttaagcagtggtatcaacgcagagtacnngaagatccnntcgcaacanntttttttttttttttttttttttttttttt

SEQ ID NO: 7978 - DNA, 84 bp, Artificial
  Barcode component
  misc_feature (33)..(34): n is a, c, g, or t
  misc_feature (43)..(44): n is a, c, g, or t
  misc_feature (53)..(54): n is a, c, g, or t
tttttttaagcagtggtatcaacgcagagtacnngaagatccnnccgctaatnntttttttttttttttttttttttttttttt

SEQ ID NO: 7979 - DNA, 84 bp, Artificial
  Barcode component
  misc_feature (33)..(34): n is a, c, g, or t
  misc_feature (43)..(44): n is a, c, g, or t
  misc_feature (53)..(54): n is a, c, g, or t
tttttttaagcagtggtatcaacgcagagtacnngaagatccnngattcgcanntttttttttttttttttttttttttttttt

SEQ ID NO: 7980 - DNA, 84 bp, Artificial
  Barcode component
  misc_feature (33)..(34): n is a, c, g, or t
  misc_feature (43)..(44): n is a, c, g, or t
  misc_feature (53)..(54): n is a, c, g, or t
tttttttaagcagtggtatcaacgcagagtacnngaagatccnncgatggaanntttttttttttttttttttttttttttttt

SEQ ID NO: 7981 - DNA, 84 bp, Artificial
  Barcode component
  misc_feature (33)..(34): n is a, c, g, or t
  misc_feature (43)..(44): n is a, c, g, or t
  misc_feature (53)..(54): n is a, c, g, or t
tttttttaagcagtggtatcaacgcagagtacnngaagatccnnagcaagganntttttttttttttttttttttttttttttt

SEQ ID NO: 7982 - DNA, 84 bp, Artificial
  Barcode component
  misc_feature (33)..(34): n is a, c, g, or t
  misc_feature (43)..(44): n is a, c, g, or t
  misc_feature (53)..(54): n is a, c, g, or t
tttttttaagcagtggtatcaacgcagagtacnngaagatccnncgtagcaanntttttttttttttttttttttttttttttt

SEQ ID NO: 7983 - DNA, 84 bp, Artificial
  Barcode component
  misc_feature (33)..(34): n is a, c, g, or t
  misc_feature (43)..(44): n is a, c, g, or t
  misc_feature (53)..(54): n is a, c, g, or t
tttttttaagcagtggtatcaacgcagagtacnngaagatccnntggcagtanntttttttttttttttttttttttttttttt

SEQ ID NO: 7984 - DNA, 84 bp, Artificial
  Barcode component
  misc_feature (33)..(34): n is a, c, g, or t
  misc_feature (43)..(44): n is a, c, g, or t
  misc_feature (53)..(54): n is a, c, g, or t
tttttttaagcagtggtatcaacgcagagtacnngaagatccnncggtagttnntttttttttttttttttttttttttttttt

SEQ ID NO: 7985 - DNA, 84 bp, Artificial
  Barcode component
  misc_feature (33)..(34): n is a, c, g, or t
  misc_feature (43)..(44): n is a, c, g, or t
  misc_feature (53)..(54): n is a, c, g, or t
tttttttaagcagtggtatcaacgcagagtacnngaagatccnntgacttcgnntttttttttttttttttttttttttttttt

SEQ ID NO: 7986 - DNA, 84 bp, Artificial
  Barcode component
  misc_feature (33)..(34): n is a, c, g, or t
  misc_feature (43)..(44): n is a, c, g, or t
  misc_feature (53)..(54): n is a, c, g, or t
tttttttaagcagtggtatcaacgcagagtacnngaagatccnngagtgcaanntttttttttttttttttttttttttttttt

SEQ ID NO: 7987 - DNA, 84 bp, Artificial
  Barcode component
  misc_feature (33)..(34): n is a, c, g, or t
  misc_feature (43)..(44): n is a, c, g, or t
  misc_feature (53)..(54): n is a, c, g, or t
tttttttaagcagtggtatcaacgcagagtacnngaagatccnnacggtaacnntttttttttttttttttttttttttttttt

SEQ ID NO: 7988 - DNA, 84 bp, Artificial
  Barcode component
  misc_feature (33)..(34): n is a, c, g, or t
  misc_feature (43)..(44): n is a, c, g, or t
  misc_feature (53)..(54): n is a, c, g, or t
tttttttaagcagtggtatcaacgcagagtacnngaagatccnnaagtggtgnntttttttttttttttttttttttttttttt

SEQ ID NO: 7989 - DNA, 84 bp, Artificial
  Barcode component
  misc_feature (33)..(34): n is a, c, g, or t
  misc_feature (43)..(44): n is a, c, g, or t
  misc_feature (53)..(54): n is a, c, g, or t
tttttttaagcagtggtatcaacgcagagtacnngaagatccnnggagacaanntttttttttttttttttttttttttttttt

SEQ ID NO: 7990 - DNA, 84 bp, Artificial
  Barcode component
  misc_feature (33)..(34): n is a, c, g, or t
  misc_feature (43)..(44): n is a, c, g, or t
  misc_feature (53)..(54): n is a, c, g, or t
tttttttaagcagtggtatcaacgcagagtacnngaagatccnntcaaggacnntttttttttttttttttttttttttttttt

SEQ ID NO: 7991 - DNA, 84 bp, Artificial
  Barcode component
  misc_feature (33)..(34): n is a, c, g, or t
  misc_feature (43)..(44): n is a, c, g, or t
  misc_feature (53)..(54): n is a, c, g, or t
tttttttaagcagtggtatcaacgcagagtacnngaagatccnnaagagagcnntttttttttttttttttttttttttttttt

SEQ ID NO: 7992 - DNA, 84 bp, Artificial
  Barcode component
  misc_feature (33)..(34): n is a, c, g, or t
  misc_feature (43)..(44): n is a, c, g, or t
  misc_feature (53)..(54): n is a, c, g, or t
tttttttaagcagtggtatcaacgcagagtacnngaagatccnncgagagatnntttttttttttttttttttttttttttttt

SEQ ID NO: 7993 - DNA, 84 bp, Artificial
  Barcode component
  misc_feature (33)..(34): n is a, c, g, or t
  misc_feature (43)..(44): n is a, c, g, or t
  misc_feature (53)..(54): n is a, c, g, or t
tttttttaagcagtggtatcaacgcagagtacnngaagatccnnacagatggnntttttttttttttttttttttttttttttt

SEQ ID NO: 7994 - DNA, 84 bp, Artificial
  Barcode component
  misc_feature (33)..(34): n is a, c, g, or t
  misc_feature (43)..(44): n is a, c, g, or t
  misc_feature (53)..(54): n is a, c, g, or t
tttttttaagcagtggtatcaacgcagagtacnngaagatccnnaggagtcanntttttttttttttttttttttttttttttt

SEQ ID NO: 7995 - DNA, 84 bp, Artificial
  Barcode component
  misc_feature (33)..(34): n is a, c, g, or t
  misc_feature (43)..(44): n is a, c, g, or t
  misc_feature (53)..(54): n is a, c, g, or t
tttttttaagcagtggtatcaacgcagagtacnngaagatccnncgtgttacnntttttttttttttttttttttttttttttt

SEQ ID NO: 7996 - DNA, 84 bp, Artificial
  Barcode component
  misc_feature (33)..(34): n is a, c, g, or t
  misc_feature (43)..(44): n is a, c, g, or t
  misc_feature (53)..(54): n is a, c, g, or t
tttttttaagcagtggtatcaacgcagagtacnngaagatccnntagtgtgcnntttttttttttttttttttttttttttttt

SEQ ID NO: 7997 - DNA, 84 bp, Artificial
  Barcode component
  misc_feature (33)..(34): n is a, c, g, or t
  misc_feature (43)..(44): n is a, c, g, or t
  misc_feature (53)..(54): n is a, c, g, or t
tttttttaagcagtggtatcaacgcagagtacnngaagatccnnctcatgacnntttttttttttttttttttttttttttttt

SEQ ID NO: 7998 - DNA, 84 bp, Artificial
  Barcode component
  misc_feature (33)..(34): n is a, c, g, or t
  misc_feature (43)..(44): n is a, c, g, or t
  misc_feature (53)..(54): n is a, c, g, or t
tttttttaagcagtggtatcaacgcagagtacnngaagatccnngtatccagnntttttttttttttttttttttttttttttt

SEQ ID NO: 7999 - DNA, 84 bp, Artificial
  Barcode component
  misc_feature (33)..(34): n is a, c, g, or t
  misc_feature (43)..(44): n is a, c, g, or t
  misc_feature (53)..(54): n is a, c, g, or t
tttttttaagcagtggtatcaacgcagagtacnngaagatccnnacgcctatnntttttttttttttttttttttttttttttt

SEQ ID NO: 8000 - DNA, 84 bp, Artificial
  Barcode component
  misc_feature (33)..(34): n is a, c, g, or t
  misc_feature (43)..(44): n is a, c, g, or t
  misc_feature (53)..(54): n is a, c, g, or t
tttttttaagcagtggtatcaacgcagagtacnngaagatccnnaacgacctnntttttttttttttttttttttttttttttt

SEQ ID NO: 8001 - DNA, 84 bp, Artificial
  Barcode component
  misc_feature (33)..(34): n is a, c, g, or t
  misc_feature (43)..(44): n is a, c, g, or t
  misc_feature (53)..(54): n is a, c, g, or t
tttttttaagcagtggtatcaacgcagagtacnngaagatccnnatcaggctnntttttttttttttttttttttttttttttt

SEQ ID NO: 8002 - DNA, 84 bp, Artificial
  Barcode component
  misc_feature (33)..(34): n is a, c, g, or t
  misc_feature (43)..(44): n is a, c, g, or t
  misc_feature (53)..(54): n is a, c, g, or t
tttttttaagcagtggtatcaacgcagagtacnngaagatccnncaagttcgnntttttttttttttttttttttttttttttt

SEQ ID NO: 8003 - DNA, 84 bp, Artificial
  Barcode component
  misc_feature (33)..(34): n is a, c, g, or t
  misc_feature (43)..(44): n is a, c, g, or t
  misc_feature (53)..(54): n is a, c, g, or t
tttttttaagcagtggtatcaacgcagagtacnngaagatccnntagccaganntttttttttttttttttttttttttttttt

SEQ ID NO: 8004 - DNA, 84 bp, Artificial
  Barcode component
  misc_feature (33)..(34): n is a, c, g, or t
  misc_feature (43)..(44): n is a, c, g, or t
  misc_feature (53)..(54): n is a, c, g, or t
tttttttaagcagtggtatcaacgcagagtacnngaagatccnncaatcacgnntttttttttttttttttttttttttttttt

SEQ ID NO: 8005 - DNA, 84 bp, Artificial
  Barcode component
  misc_feature (33)..(34): n is a, c, g, or t
  misc_feature (43)..(44): n is a, c, g, or t
  misc_feature (53)..(54): n is a, c, g, or t
tttttttaagcagtggtatcaacgcagagtacnngaagatccnngcaacaagnntttttttttttttttttttttttttttttt

SEQ ID NO: 8006 - DNA, 84 bp, Artificial
  Barcode component
  misc_feature (33)..(34): n is a, c, g, or t
  misc_feature (43)..(44): n is a, c, g, or t
  misc_feature (53)..(54): n is a, c, g, or t
tttttttaagcagtggtatcaacgcagagtacnngaagatccnncacgacaanntttttttttttttttttttttttttttttt

SEQ ID NO: 8007 - DNA, 84 bp, Artificial
  Barcode component
  misc_feature (33)..(34): n is a, c, g, or t
  misc_feature (43)..(44): n is a, c, g, or t
  misc_feature (53)..(54): n is a, c, g, or t
tttttttaagcagtggtatcaacgcagagtacnngaagatccnntacggaganntttttttttttttttttttttttttttttt

SEQ ID NO: 8008 - DNA, 84 bp, Artificial
  Barcode component
  misc_feature (33)..(34): n is a, c, g, or t
  misc_feature (43)..(44): n is a, c, g, or t
  misc_feature (53)..(54): n is a, c, g, or t
tttttttaagcagtggtatcaacgcagagtacnngaagatccnncgacaaganntttttttttttttttttttttttttttttt

SEQ ID NO: 8009 - DNA, 84 bp, Artificial
  Barcode component
  misc_feature (33)..(34): n is a, c, g, or t
  misc_feature (43)..(44): n is a, c, g, or t
  misc_feature (53)..(54): n is a, c, g, or t
tttttttaagcagtggtatcaacgcagagtacnngaagatccnncgaagtganntttttttttttttttttttttttttttttt

SEQ ID NO: 8010 - DNA, 84 bp, Artificial
  Barcode component
  misc_feature (33)..(34): n is a, c, g, or t
  misc_feature (43)..(44): n is a, c, g, or t
  misc_feature (53)..(54): n is a, c, g, or t
tttttttaagcagtggtatcaacgcagagtacnngaagatccnnagctggtanntttttttttttttttttttttttttttttt

SEQ ID NO: 8011 - DNA, 84 bp, Artificial
  Barcode component
  misc_feature (33)..(34): n is a, c, g, or t
  misc_feature (43)..(44): n is a, c, g, or t
  misc_feature (53)..(54): n is a, c, g, or t
tttttttaagcagtggtatcaacgcagagtacnngaagatccnnaactaggcnntttttttttttttttttttttttttttttt

SEQ ID NO: 8012 - DNA, 84 bp, Artificial
  Barcode component
  misc_feature (33)..(34): n is a, c, g, or t
  misc_feature (43)..(44): n is a, c, g, or t
  misc_feature (53)..(54): n is a, c, g, or t
tttttttaagcagtggtatcaacgcagagtacnngaagatccnncagcaagtnntttttttttttttttttttttttttttttt

SEQ ID NO: 8013 - DNA, 84 bp, Artificial
  Barcode component
  misc_feature (33)..(34): n is a, c, g, or t
  misc_feature (43)..(44): n is a, c, g, or t
  misc_feature (53)..(54): n is a, c, g, or t
tttttttaagcagtggtatcaacgcagagtacnngaagatccnnacgaggtanntttttttttttttttttttttttttttttt

SEQ ID NO: 8014 - DNA, 84 bp, Artificial
  Barcode component
  misc_feature (33)..(34): n is a, c, g, or t
  misc_feature (43)..(44): n is a, c, g, or t
  misc_feature (53)..(54): n is a, c, g, or t
tttttttaagcagtggtatcaacgcagagtacnngaagatccnncatcttccnntttttttttttttttttttttttttttttt

SEQ ID NO: 8015 - DNA, 84 bp, Artificial
  Barcode component
  misc_feature (33)..(34): n is a, c, g, or t
  misc_feature (43)..(44): n is a, c, g, or t
  misc_feature (53)..(54): n is a, c, g, or t
tttttttaagcagtggtatcaacgcagagtacnngaagatccnncctgaatcnntttttttttttttttttttttttttttttt

SEQ ID NO: 8016 - DNA, 84 bp, Artificial
  Barcode component
  misc_feature (33)..(34): n is a, c, g, or t
  misc_feature (43)..(44): n is a, c, g, or t
  misc_feature (53)..(54): n is a, c, g, or t
tttttttaagcagtggtatcaacgcagagtacnngaagatccnntgcagactnntttttttttttttttttttttttttttttt

SEQ ID NO: 8017 - DNA, 84 bp, Artificial
  Barcode component
  misc_feature (33)..(34): n is a, c, g, or t
  misc_feature (43)..(44): n is a, c, g, or t
  misc_feature (53)..(54): n is a, c, g, or t
tttttttaagcagtggtatcaacgcagagtacnngaagatccnnagatgtggnntttttttttttttttttttttttttttttt

SEQ ID NO: 8018 - DNA, 84 bp, Artificial
  Barcode component
  misc_feature (33)..(34): n is a, c, g, or t
  misc_feature (43)..(44): n is a, c, g, or t
  misc_feature (53)..(54): n is a, c, g, or t
tttttttaagcagtggtatcaacgcagagtacnngaagatccnnagttcgacnntttttttttttttttttttttttttttttt

SEQ ID NO: 8019 - DNA, 84 bp, Artificial
  Barcode component
  misc_feature (33)..(34): n is a, c, g, or t
  misc_feature (43)..(44): n is a, c, g, or t
  misc_feature (53)..(54): n is a, c, g, or t
tttttttaagcagtggtatcaacgcagagtacnngaagatccnnacaacctcnntttttttttttttttttttttttttttttt

SEQ ID NO: 8020 - DNA, 84 bp, Artificial
  Barcode component
  misc_feature (33)..(34): n is a, c, g, or t
  misc_feature (43)..(44): n is a, c, g, or t
  misc_feature (53)..(54): n is a, c, g, or t
tttttttaagcagtggtatcaacgcagagtacnngaagatccnncatggtagnntttttttttttttttttttttttttttttt

SEQ ID NO: 8021 - DNA, 84 bp, Artificial
  Barcode component
  misc_feature (33)..(34): n is a, c, g, or t
  misc_feature (43)..(44): n is a, c, g, or t
  misc_feature (53)..(54): n is a, c, g, or t
tttttttaagcagtggtatcaacgcagagtacnngaagatccnncgtatctcnntttttttttttttttttttttttttttttt

SEQ ID NO: 8022 - DNA, 84 bp, Artificial
  Barcode component
  misc_feature (33)..(34): n is a, c, g, or t
  misc_feature (43)..(44): n is a, c, g, or t
  misc_feature (53)..(54): n is a, c, g, or t
tttttttaagcagtggtatcaacgcagagtacnngaagatccnncctagttcnntttttttttttttttttttttttttttttt

SEQ ID NO: 8023 - DNA, 84 bp, Artificial
  Barcode component
  misc_feature (33)..(34): n is a, c, g, or t
  misc_feature (43)..(44): n is a, c, g, or t
  misc_feature (53)..(54): n is a, c, g, or t
tttttttaagcagtggtatcaacgcagagtacnngaagatccnncaagagtcnntttttttttttttttttttttttttttttt

SEQ ID NO: 8024 - DNA, 84 bp, Artificial
  Barcode component
  misc_feature (33)..(34): n is a, c, g, or t
  misc_feature (43)..(44): n is a, c, g, or t
  misc_feature (53)..(54): n is a, c, g, or t
tttttttaagcagtggtatcaacgcagagtacnnagtggagannaatcggcanntttttttttttttttttttttttttttttt

SEQ ID NO: 8025 - DNA, 84 bp, Artificial
  Barcode component
  misc_feature (33)..(34): n is a, c, g, or t
  misc_feature (43)..(44): n is a, c, g, or t
  misc_feature (53)..(54): n is a, c, g, or t
tttttttaagcagtggtatcaacgcagagtacnnagtggaganntacggcatnntttttttttttttttttttttttttttttt

SEQ ID NO: 8026 - DNA, 84 bp, Artificial
  Barcode component
  misc_feature (33)..(34): n is a, c, g, or t
  misc_feature (43)..(44): n is a, c, g, or t
  misc_feature (53)..(54): n is a, c, g, or t
tttttttaagcagtggtatcaacgcagagtacnnagtggagannttggatcgnntttttttttttttttttttttttttttttt

SEQ ID NO: 8027 - DNA, 84 bp, Artificial
  Barcode component
  misc_feature (33)..(34): n is a, c, g, or t
  misc_feature (43)..(44): n is a, c, g, or t
  misc_feature (53)..(54): n is a, c, g, or t
tttttttaagcagtggtatcaacgcagagtacnnagtggaganntggaacganntttttttttttttttttttttttttttttt

SEQ ID NO: 8028 - DNA, 84 bp, Artificial
  Barcode component
  misc_feature (33)..(34): n is a, c, g, or t
  misc_feature (43)..(44): n is a, c, g, or t
  misc_feature (53)..(54): n is a, c, g, or t
tttttttaagcagtggtatcaacgcagagtacnnagtggagannggcaatcanntttttttttttttttttttttttttttttt

SEQ ID NO: 8029 - DNA, 84 bp, Artificial
  Barcode component
  misc_feature (33)..(34): n is a, c, g, or t
  misc_feature (43)..(44): n is a, c, g, or t
  misc_feature (53)..(54): n is a, c, g, or t
tttttttaagcagtggtatcaacgcagagtacnnagtggaganngaatccganntttttttttttttttttttttttttttttt

SEQ ID NO: 8030 - DNA, 84 bp, Artificial
  Barcode component
  misc_feature (33)..(34): n is a, c, g, or t
  misc_feature (43)..(44): n is a, c, g, or t
  misc_feature (53)..(54): n is a, c, g, or t
tttttttaagcagtggtatcaacgcagagtacnnagtggagannttacggtgnntttttttttttttttttttttttttttttt

SEQ ID NO: 8031 - DNA, 84 bp, Artificial
  Barcode component
  misc_feature (33)..(34): n is a, c, g, or t
  misc_feature (43)..(44): n is a, c, g, or t
  misc_feature (53)..(54): n is a, c, g, or t
tttttttaagcagtggtatcaacgcagagtacnnagtggaganncatatcggnntttttttttttttttttttttttttttttt

SEQ ID NO: 8032 - DNA, 84 bp, Artificial
  Barcode component
  misc_feature (33)..(34): n is a, c, g, or t
  misc_feature (43)..(44): n is a, c, g, or t
  misc_feature (53)..(54): n is a, c, g, or t
tttttttaagcagtggtatcaacgcagagtacnnagtggaganncttcggtanntttttttttttttttttttttttttttttt

SEQ ID NO: 8033 - DNA, 84 bp, Artificial
  Barcode component
  misc_feature (33)..(34): n is a, c, g, or t
  misc_feature (43)..(44): n is a, c, g, or t
  misc_feature (53)..(54): n is a, c, g, or t
tttttttaagcagtggtatcaacgcagagtacnnagtggaganntcctaacgnntttttttttttttttttttttttttttttt

SEQ ID NO: 8034 - DNA, 84 bp, Artificial
  Barcode component
  misc_feature (33)..(34): n is a, c, g, or t
  misc_feature (43)..(44): n is a, c, g, or t
  misc_feature (53)..(54): n is a, c, g, or t
tttttttaagcagtggtatcaacgcagagtacnnagtggaganngtaagccanntttttttttttttttttttttttttttttt

SEQ ID NO: 8035 - DNA, 84 bp, Artificial
  Barcode component
  misc_feature (33)..(34): n is a, c, g, or t
  misc_feature (43)..(44): n is a, c, g, or t
  misc_feature (53)..(54): n is a, c, g, or t
tttttttaagcagtggtatcaacgcagagtacnnagtggaganntaaggtggnntttttttttttttttttttttttttttttt

SEQ ID NO: 8036 - DNA, 84 bp, Artificial
  Barcode component
  misc_feature (33)..(34): n is a, c, g, or t
  misc_feature (43)..(44): n is a, c, g, or t
  misc_feature (53)..(54): n is a, c, g, or t
tttttttaagcagtggtatcaacgcagagtacnnagtggagannggtaagctnntttttttttttttttttttttttttttttt

SEQ ID NO: 8037 - DNA, 84 bp, Artificial
  Barcode component
  misc_feature (33)..(34): n is a, c, g, or t
  misc_feature (43)..(44): n is a, c, g, or t
  misc_feature (53)..(54): n is a, c, g, or t
tttttttaagcagtggtatcaacgcagagtacnnagtggaganntgtgtcganntttttttttttttttttttttttttttttt

SEQ ID NO: 8038 - DNA, 84 bp, Artificial
  Barcode component
  misc_feature (33)..(34): n is a, c, g, or t
  misc_feature (43)..(44): n is a, c, g, or t
  misc_feature (53)..(54): n is a, c, g, or t
tttttttaagcagtggtatcaacgcagagtacnnagtggaganngagcatganntttttttttttttttttttttttttttttt

SEQ ID NO: 8039 - DNA, 84 bp, Artificial
  Barcode component
  misc_feature (33)..(34): n is a, c, g, or t
  misc_feature (43)..(44): n is a, c, g, or t
  misc_feature (53)..(54): n is a, c, g, or t
tttttttaagcagtggtatcaacgcagagtacnnagtggaganntcgaagtcnntttttttttttttttttttttttttttttt

SEQ ID NO: 8040 - DNA, 84 bp, Artificial
  Barcode component
  misc_feature (33)..(34): n is a, c, g, or t
  misc_feature (43)..(44): n is a, c, g, or t
  misc_feature (53)..(54): n is a, c, g, or t
tttttttaagcagtggtatcaacgcagagtacnnagtggagannggtgaacanntttttttttttttttttttttttttttttt

SEQ ID NO: 8041 - DNA, 84 bp, Artificial
  Barcode component
  misc_feature (33)..(34): n is a, c, g, or t
  misc_feature (43)..(44): n is a, c, g, or t
  misc_feature (53)..(54): n is a, c, g, or t
tttttttaagcagtggtatcaacgcagagtacnnagtggagannacatgcacnntttttttttttttttttttttttttttttt

SEQ ID NO: 8042 - DNA, 84 bp, Artificial
  Barcode component
  misc_feature (33)..(34): n is a, c, g, or t
  misc_feature (43)..(44): n is a, c, g, or t
  misc_feature (53)..(54): n is a, c, g, or t
tttttttaagcagtggtatcaacgcagagtacnnagtggagannccaacagtnntttttttttttttttttttttttttttttt

SEQ ID NO: 8043 - DNA, 84 bp, Artificial
  Barcode component
  misc_feature (33)..(34): n is a, c, g, or t
  misc_feature (43)..(44): n is a, c, g, or t
  misc_feature (53)..(54): n is a, c, g, or t
tttttttaagcagtggtatcaacgcagagtacnnagtggagannagaacagcnntttttttttttttttttttttttttttttt

SEQ ID NO: 8044 - DNA, 84 bp, Artificial
  Barcode component
  misc_feature (33)..(34): n is a, c, g, or t
  misc_feature (43)..(44): n is a, c, g, or t
  misc_feature (53)..(54): n is a, c, g, or t
tttttttaagcagtggtatcaacgcagagtacnnagtggaganngaacacgtnntttttttttttttttttttttttttttttt

SEQ ID NO: 8045 - DNA, 84 bp, Artificial
  Barcode component
  misc_feature (33)..(34): n is a, c, g, or t
  misc_feature (43)..(44): n is a, c, g, or t
  misc_feature (53)..(54): n is a, c, g, or t
tttttttaagcagtggtatcaacgcagagtacnnagtggagannggtcttcanntttttttttttttttttttttttttttttt

SEQ ID NO: 8046 - DNA, 84 bp, Artificial
  Barcode component
  misc_feature (33)..(34): n is a, c, g, or t
  misc_feature (43)..(44): n is a, c, g, or t
  misc_feature (53)..(54): n is a, c, g, or t
tttttttaagcagtggtatcaacgcagagtacnnagtggagannaggttcagnntttttttttttttttttttttttttttttt

SEQ ID NO: 8047 - DNA, 84 bp, Artificial
  Barcode component
  misc_feature (33)..(34): n is a, c, g, or t
  misc_feature (43)..(44): n is a, c, g, or t
  misc_feature (53)..(54): n is a, c, g, or t
tttttttaagcagtggtatcaacgcagagtacnnagtggagannctagagcanntttttttttttttttttttttttttttttt

SEQ ID NO: 8048 - DNA, 84 bp, Artificial
  Barcode component
  misc_feature (33)..(34): n is a, c, g, or t
  misc_feature (43)..(44): n is a, c, g, or t
  misc_feature (53)..(54): n is a, c, g, or t
tttttttaagcagtggtatcaacgcagagtacnnagtggaganncttctagcnntttttttttttttttttttttttttttttt

SEQ ID NO: 8049 - DNA, 84 bp, Artificial
  Barcode component
  misc_feature (33)..(34): n is a, c, g, or t
  misc_feature (43)..(44): n is a, c, g, or t
  misc_feature (53)..(54): n is a, c, g, or t
tttttttaagcagtggtatcaacgcagagtacnnagtggaganngagtaacgnntttttttttttttttttttttttttttttt

SEQ ID NO: 8050 - DNA, 84 bp, Artificial
  Barcode component
  misc_feature (33)..(34): n is a, c, g, or t
  misc_feature (43)..(44): n is a, c, g, or t
  misc_feature (53)..(54): n is a, c, g, or t
tttttttaagcagtggtatcaacgcagagtacnnagtggagannctaagaggnntttttttttttttttttttttttttttttt

SEQ ID NO: 8051 - DNA, 84 bp, Artificial
  Barcode component
  misc_feature (33)..(34): n is a, c, g, or t
  misc_feature (43)..(44): n is a, c, g, or t
  misc_feature (53)..(54): n is a, c, g, or t
tttttttaagcagtggtatcaacgcagagtacnnagtggagannacgtgtagnntttttttttttttttttttttttttttttt

SEQ ID NO: 8052 - DNA, 84 bp, Artificial
  Barcode component
  misc_feature (33)..(34): n is a, c, g, or t
  misc_feature (43)..(44): n is a, c, g, or t
  misc_feature (53)..(54): n is a, c, g, or t
tttttttaagcagtggtatcaacgcagagtacnnagtggagannactacaggnntttttttttttttttttttttttttttttt

SEQ ID NO: 8053 - DNA, 84 bp, Artificial
  Barcode component
  misc_feature (33)..(34): n is a, c, g, or t
  misc_feature (43)..(44): n is a, c, g, or t
  misc_feature (53)..(54): n is a, c, g, or t
tttttttaagcagtggtatcaacgcagagtacnnagtggaganntacaggtcnntttttttttttttttttttttttttttttt

SEQ ID NO: 8054 - DNA, 84 bp, Artificial
  Barcode component
  misc_feature (33)..(34): n is a, c, g, or t
  misc_feature (43)..(44): n is a, c, g, or t
  misc_feature (53)..(54): n is a, c, g, or t
tttttttaagcagtggtatcaacgcagagtacnnagtggagannctcacatgnntttttttttttttttttttttttttttttt

SEQ ID NO: 8055 - DNA, 84 bp, Artificial
  Barcode component
  misc_feature (33)..(34): n is a, c, g, or t
  misc_feature (43)..(44): n is a, c, g, or t
  misc_feature (53)..(54): n is a, c, g, or t
tttttttaagcagtggtatcaacgcagagtacnnagtggagannactaggagnntttttttttttttttttttttttttttttt

SEQ ID NO: 8056 - DNA, 84 bp, Artificial
  Barcode component
  misc_feature (33)..(34): n is a, c, g, or t
  misc_feature (43)..(44): n is a, c, g, or t
  misc_feature (53)..(54): n is a, c, g, or t
tttttttaagcagtggtatcaacgcagagtacnnagtggagannccatagganntttttttttttttttttttttttttttttt

SEQ ID NO: 8057 - DNA, 84 bp, Artificial
  Barcode component
  misc_feature (33)..(34): n is a, c, g, or t
  misc_feature (43)..(44): n is a, c, g, or t
  misc_feature (53)..(54): n is a, c, g, or t
tttttttaagcagtggtatcaacgcagagtacnnagtggagannggagaatcnntttttttttttttttttttttttttttttt

SEQ ID NO: 8058 - DNA, 84 bp, Artificial
  Barcode component
  misc_feature (33)..(34): n is a, c, g, or t
  misc_feature (43)..(44): n is a, c, g, or t
  misc_feature (53)..(54): n is a, c, g, or t
tttttttaagcagtggtatcaacgcagagtacnnagtggaganngccaagaanntttttttttttttttttttttttttttttt

SEQ ID NO: 8059 - DNA, 84 bp, Artificial
  Barcode component
  misc_feature (33)..(34): n is a, c, g, or t
  misc_feature (43)..(44): n is a, c, g, or t
  misc_feature (53)..(54): n is a, c, g, or t
tttttttaagcagtggtatcaacgcagagtacnnagtggagannaaggcaagnntttttttttttttttttttttttttttttt

SEQ ID NO: 8060 - DNA, 84 bp, Artificial
  Barcode component
  misc_feature (33)..(34): n is a, c, g, or t
  misc_feature (43)..(44): n is a, c, g, or t
  misc_feature (53)..(54): n is a, c, g, or t
tttttttaagcagtggtatcaacgcagagtacnnagtggagannaatgtcgcnntttttttttttttttttttttttttttttt

SEQ ID NO: 8061 - DNA, 84 bp, Artificial
  Barcode component
  misc_feature (33)..(34): n is a, c, g, or t
  misc_feature (43)..(44): n is a, c, g, or t
  misc_feature (53)..(54): n is a, c, g, or t
tttttttaagcagtggtatcaacgcagagtacnnagtggagannatggaaccnntttttttttttttttttttttttttttttt

SEQ ID NO: 8062 - DNA, 84 bp, Artificial
  Barcode component
  misc_feature (33)..(34): n is a, c, g, or t
  misc_feature (43)..(44): n is a, c, g, or t
  misc_feature (53)..(54): n is a, c, g, or t
tttttttaagcagtggtatcaacgcagagtacnnagtggagannagaggcatnntttttttttttttttttttttttttttttt

SEQ ID NO: 8063 - DNA, 84 bp, Artificial
  Barcode component
  misc_feature (33)..(34): n is a, c, g, or t
  misc_feature (43)..(44): n is a, c, g, or t
  misc_feature (53)..(54): n is a, c, g, or t
tttttttaagcagtggtatcaacgcagagtacnnagtggaganntgcatagcnntttttttttttttttttttttttttttttt

SEQ ID NO: 8064 - DNA, 84 bp, Artificial
  Barcode component
  misc_feature (33)..(34): n is a, c, g, or t
  misc_feature (43)..(44): n is a, c, g, or t
  misc_feature (53)..(54): n is a, c, g, or t
tttttttaagcagtggtatcaacgcagagtacnnagtggagannctaacgganntttttttttttttttttttttttttttttt

SEQ ID NO: 8065 - DNA, 84 bp, Artificial
  Barcode component
  misc_feature (33)..(34): n is a, c, g, or t
  misc_feature (43)..(44): n is a, c, g, or t
  misc_feature (53)..(54): n is a, c, g, or t
tttttttaagcagtggtatcaacgcagagtacnnagtggaganntatcgaggnntttttttttttttttttttttttttttttt

SEQ ID NO: 8066 - DNA, 84 bp, Artificial
  Barcode component
  misc_feature (33)..(34): n is a, c, g, or t
  misc_feature (43)..(44): n is a, c, g, or t
  misc_feature (53)..(54): n is a, c, g, or t
tttttttaagcagtggtatcaacgcagagtacnnagtggaganncatagcctnntttttttttttttttttttttttttttttt

SEQ ID NO: 8067 - DNA, 84 bp, Artificial
  Barcode component
  misc_feature (33)..(34): n is a, c, g, or t
  misc_feature (43)..(44): n is a, c, g, or t
  misc_feature (53)..(54): n is a, c, g, or t
tttttttaagcagtggtatcaacgcagagtacnnagtggagannatcgagacnntttttttttttttttttttttttttttttt

SEQ ID NO: 8068 - DNA, 84 bp, Artificial
  Barcode component
  misc_feature (33)..(34): n is a, c, g, or t
  misc_feature (43)..(44): n is a, c, g, or t
  misc_feature (53)..(54): n is a, c, g, or t
tttttttaagcagtggtatcaacgcagagtacnnagtggagannggaagagtnntttttttttttttttttttttttttttttt

SEQ ID NO: 8069 - DNA, 84 bp, Artificial
  Barcode component
  misc_feature (33)..(34): n is a, c, g, or t
  misc_feature (43)..(44): n is a, c, g, or t
  misc_feature (53)..(54): n is a, c, g, or t
tttttttaagcagtggtatcaacgcagagtacnnagtggagannccaagtagnntttttttttttttttttttttttttttttt

SEQ ID NO: 8070 - DNA, 84 bp, Artificial
  Barcode component
  misc_feature (33)..(34): n is a, c, g, or t
  misc_feature (43)..(44): n is a, c, g, or t
  misc_feature (53)..(54): n is a, c, g, or t
tttttttaagcagtggtatcaacgcagagtacnnagtggagannctgaacagnntttttttttttttttttttttttttttttt

SEQ ID NO: 8071 - DNA, 84 bp, Artificial
  Barcode component
  misc_feature (33)..(34): n is a, c, g, or t
  misc_feature (43)..(44): n is a, c, g, or t
  misc_feature (53)..(54): n is a, c, g, or t
tttttttaagcagtggtatcaacgcagagtacnnagtggaganngtaggttcnntttttttttttttttttttttttttttttt

SEQ ID NO: 8072 - DNA, 84 bp, Artificial
  Barcode component
  misc_feature (33)..(34): n is a, c, g, or t
  misc_feature (43)..(44): n is a, c, g, or t
  misc_feature (53)..(54): n is a, c, g, or t
tttttttaagcagtggtatcaacgcagagtacnnagtggaganngtatggacnntttttttttttttttttttttttttttttt

SEQ ID NO: 8073 - DNA, 84 bp, Artificial
  Barcode component
  misc_feature (33)..(34): n is a, c, g, or t
  misc_feature (43)..(44): n is a, c, g, or t
  misc_feature (53)..(54): n is a, c, g, or t
tttttttaagcagtggtatcaacgcagagtacnnagtggaganntcgcaacanntttttttttttttttttttttttttttttt

SEQ ID NO: 8074 - DNA, 84 bp, Artificial
  Barcode component
  misc_feature (33)..(34): n is a, c, g, or t
  misc_feature (43)..(44): n is a, c, g, or t
  misc_feature (53)..(54): n is a, c, g, or t
tttttttaagcagtggtatcaacgcagagtacnnagtggagannccgctaatnntttttttttttttttttttttttttttttt

SEQ ID NO: 8075 - DNA, 84 bp, Artificial
  Barcode component
  misc_feature (33)..(34): n is a, c, g, or t
  misc_feature (43)..(44): n is a, c, g, or t
  misc_feature (53)..(54): n is a, c, g, or t
tttttttaagcagtggtatcaacgcagagtacnnagtggaganngattcgcanntttttttttttttttttttttttttttttt

SEQ ID NO: 8076 - DNA, 84 bp, Artificial
  Barcode component
  misc_feature (33)..(34): n is a, c, g, or t
  misc_feature (43)..(44): n is a, c, g, or t
  misc_feature (53)..(54): n is a, c, g, or t
tttttttaagcagtggtatcaacgcagagtacnnagtggaganncgatggaanntttttttttttttttttttttttttttttt

SEQ ID NO: 8077 - DNA, 84 bp, Artificial
  Barcode component
  misc_feature (33)..(34): n is a, c, g, or t
  misc_feature (43)..(44): n is a, c, g, or t
  misc_feature (53)..(54): n is a, c, g, or t
tttttttaagcagtggtatcaacgcagagtacnnagtggagannagcaagganntttttttttttttttttttttttttttttt

SEQ ID NO: 8078 - DNA, 84 bp, Artificial
  Barcode component
  misc_feature (33)..(34): n is a, c, g, or t
  misc_feature (43)..(44): n is a, c, g, or t
  misc_feature (53)..(54): n is a, c, g, or t
tttttttaagcagtggtatcaacgcagagtacnnagtggaganncgtagcaanntttttttttttttttttttttttttttttt

SEQ ID NO: 8079 - DNA, 84 bp, Artificial
  Barcode component
  misc_feature (33)..(34): n is a, c, g, or t
  misc_feature (43)..(44): n is a, c, g, or t
  misc_feature (53)..(54): n is a, c, g, or t
tttttttaagcagtggtatcaacgcagagtacnnagtggaganntggcagtanntttttttttttttttttttttttttttttt

SEQ ID NO: 8080 - DNA, 84 bp, Artificial
  Barcode component
  misc_feature (33)..(34): n is a, c, g, or t
  misc_feature (43)..(44): n is a, c, g, or t
  misc_feature (53)..(54): n is a, c, g, or t
tttttttaagcagtggtatcaacgcagagtacnnagtggaganncggtagttnntttttttttttttttttttttttttttttt

SEQ ID NO: 8081 - DNA, 84 bp, Artificial
  Barcode component
  misc_feature (33)..(34): n is a, c, g, or t
  misc_feature (43)..(44): n is a, c, g, or t
  misc_feature (53)..(54): n is a, c, g, or t
tttttttaagcagtggtatcaacgcagagtacnnagtggaganntgacttcgnntttttttttttttttttttttttttttttt

SEQ ID NO: 8082 - DNA, 84 bp, Artificial
  Barcode component
  misc_feature (33)..(34): n is a, c, g, or t
  misc_feature (43)..(44): n is a, c, g, or t
  misc_feature (53)..(54): n is a, c, g, or t
tttttttaagcagtggtatcaacgcagagtacnnagtggaganngagtgcaanntttttttttttttttttttttttttttttt

SEQ ID NO: 8083 - DNA, 84 bp, Artificial
  Barcode component
  misc_feature (33)..(34): n is a, c, g, or t
  misc_feature (43)..(44): n is a, c, g, or t
  misc_feature (53)..(54): n is a, c, g, or t
tttttttaagcagtggtatcaacgcagagtacnnagtggagannacggtaacnntttttttttttttttttttttttttttttt

SEQ ID NO: 8084 - DNA, 84 bp, Artificial
  Barcode component
  misc_feature (33)..(34): n is a, c, g, or t
  misc_feature (43)..(44): n is a, c, g, or t
  misc_feature (53)..(54): n is a, c, g, or t
tttttttaagcagtggtatcaacgcagagtacnnagtggagannaagtggtgnntttttttttttttttttttttttttttttt

SEQ ID NO: 8085 - DNA, 84 bp, Artificial
  Barcode component
  misc_feature (33)..(34): n is a, c, g, or t
  misc_feature (43)..(44): n is a, c, g, or t
  misc_feature (53)..(54): n is a, c, g, or t
tttttttaagcagtggtatcaacgcagagtacnnagtggagannggagacaanntttttttttttttttttttttttttttttt

SEQ ID NO: 8086 - DNA, 84 bp, Artificial
  Barcode component
  misc_feature (33)..(34): n is a, c, g, or t
  misc_feature (43)..(44): n is a, c, g, or t
  misc_feature (53)..(54): n is a, c, g, or t
tttttttaagcagtggtatcaacgcagagtacnnagtggaganntcaaggacnntttttttttttttttttttttttttttttt

SEQ ID NO: 8087 - DNA, 84 bp, Artificial
  Barcode component
  misc_feature (33)..(34): n is a, c, g, or t
  misc_feature (43)..(44): n is a, c, g, or t
  misc_feature (53)..(54): n is a, c, g, or t
tttttttaagcagtggtatcaacgcagagtacnnagtggagannaagagagcnntttttttttttttttttttttttttttttt

SEQ ID NO: 8088 - DNA, 84 bp, Artificial
  Barcode component
  misc_feature (33)..(34): n is a, c, g, or t
  misc_feature (43)..(44): n is a, c, g, or t
  misc_feature (53)..(54): n is a, c, g, or t
tttttttaagcagtggtatcaacgcagagtacnnagtggaganncgagagatnntttttttttttttttttttttttttttttt

SEQ ID NO: 8089 - DNA, 84 bp, Artificial
  Barcode component
  misc_feature (33)..(34): n is a, c, g, or t
  misc_feature (43)..(44): n is a, c, g, or t
  misc_feature (53)..(54): n is a, c, g, or t
tttttttaagcagtggtatcaacgcagagtacnnagtggagannacagatggnntttttttttttttttttttttttttttttt

SEQ ID NO: 8090 - DNA, 84 bp, Artificial
  Barcode component
  misc_feature (33)..(34): n is a, c, g, or t
  misc_feature (43)..(44): n is a, c, g, or t
  misc_feature (53)..(54): n is a, c, g, or t
tttttttaagcagtggtatcaacgcagagtacnnagtggagannaggagtcanntttttttttttttttttttttttttttttt

SEQ ID NO: 8091 - DNA, 84 bp, Artificial
  Barcode component
  misc_feature (33)..(34): n is a, c, g, or t
  misc_feature (43)..(44): n is a, c, g, or t
  misc_feature (53)..(54): n is a, c, g, or t
tttttttaagcagtggtatcaacgcagagtacnnagtggaganncgtgttacnntttttttttttttttttttttttttttttt

SEQ ID NO: 8092 - DNA, 84 bp, Artificial
  Barcode component
  misc_feature (33)..(34): n is a, c, g, or t
  misc_feature (43)..(44): n is a, c, g, or t
  misc_feature (53)..(54): n is a, c, g, or t
tttttttaagcagtggtatcaacgcagagtacnnagtggaganntagtgtgcnntttttttttttttttttttttttttttttt

SEQ ID NO: 8093 - DNA, 84 bp, Artificial
  Barcode component
  misc_feature (33)..(34): n is a, c, g, or t
  misc_feature (43)..(44): n is a, c, g, or t
  misc_feature (53)..(54): n is a, c, g, or t
tttttttaagcagtggtatcaacgcagagtacnnagtggagannctcatgacnntttttttttttttttttttttttttttttt

SEQ ID NO: 8094 - DNA, 84 bp, Artificial
  Barcode component
  misc_feature (33)..(34): n is a, c, g, or t
  misc_feature (43)..(44): n is a, c, g, or t
  misc_feature (53)..(54): n is a, c, g, or t
tttttttaagcagtggtatcaacgcagagtacnnagtggaganngtatccagnntttttttttttttttttttttttttttttt

SEQ ID NO: 8095 - DNA, 84 bp, Artificial
  Barcode component
  misc_feature (33)..(34): n is a, c, g, or t
  misc_feature (43)..(44): n is a, c, g, or t
  misc_feature (53)..(54): n is a, c, g, or t
tttttttaagcagtggtatcaacgcagagtacnnagtggagannacgcctatnntttttttttttttttttttttttttttttt

SEQ ID NO: 8096 - DNA, 84 bp, Artificial
  Barcode component
  misc_feature (33)..(34): n is a, c, g, or t
  misc_feature (43)..(44): n is a, c, g, or t
  misc_feature (53)..(54): n is a, c, g, or t
tttttttaagcagtggtatcaacgcagagtacnnagtggagannaacgacctnntttttttttttttttttttttttttttttt

SEQ ID NO: 8097 - DNA, 84 bp, Artificial
  Barcode component
  misc_feature (33)..(34): n is a, c, g, or t
  misc_feature (43)..(44): n is a, c, g, or t
  misc_feature (53)..(54): n is a, c, g, or t
tttttttaagcagtggtatcaacgcagagtacnnagtggagannatcaggctnntttttttttttttttttttttttttttttt

SEQ ID NO: 8098 - DNA, 84 bp, Artificial
  Barcode component
  misc_feature (33)..(34): n is a, c, g, or t
  misc_feature (43)..(44): n is a, c, g, or t
  misc_feature (53)..(54): n is a, c, g, or t
tttttttaagcagtggtatcaacgcagagtacnnagtggaganncaagttcgnntttttttttttttttttttttttttttttt

SEQ ID NO: 8099 - DNA, 84 bp, Artificial
  Barcode component
  misc_feature (33)..(34): n is a, c, g, or t
  misc_feature (43)..(44): n is a, c, g, or t
  misc_feature (53)..(54): n is a, c, g, or t
tttttttaagcagtggtatcaacgcagagtacnnagtggaganntagccaganntttttttttttttttttttttttttttttt

SEQ ID NO: 8100 - DNA, 84 bp, Artificial
  Barcode component
  misc_feature (33)..(34): n is a, c, g, or t
  misc_feature (43)..(44): n is a, c, g, or t
  misc_feature (53)..(54): n is a, c, g, or t
tttttttaagcagtggtatcaacgcagagtacnnagtggaganncaatcacgnntttttttttttttttttttttttttttttt

SEQ ID NO: 8101 - DNA, 84 bp, Artificial
  Barcode component
  misc_feature (33)..(34): n is a, c, g, or t
  misc_feature (43)..(44): n is a, c, g, or t
  misc_feature (53)..(54): n is a, c, g, or t
tttttttaagcagtggtatcaacgcagagtacnnagtggaganngcaacaagnntttttttttttttttttttttttttttttt

SEQ ID NO: 8102 - DNA, 84 bp, Artificial
  Barcode component
  misc_feature (33)..(34): n is a, c, g, or t
  misc_feature (43)..(44): n is a, c, g, or t
  misc_feature (53)..(54): n is a, c, g, or t
tttttttaagcagtggtatcaacgcagagtacnnagtggaganncacgacaanntttttttttttttttttttttttttttttt

SEQ ID NO: 8103 - DNA, 84 bp, Artificial
  Barcode component
  misc_feature (33)..(34): n is a, c, g, or t
  misc_feature (43)..(44): n is a, c, g, or t
  misc_feature (53)..(54): n is a, c, g, or t
tttttttaagcagtggtatcaacgcagagtacnnagtggaganntacggaganntttttttttttttttttttttttttttttt

SEQ ID NO: 8104 - DNA, 84 bp, Artificial
  Barcode component
  misc_feature (33)..(34): n is a, c, g, or t
  misc_feature (43)..(44): n is a, c, g, or t
  misc_feature (53)..(54): n is a, c, g, or t
tttttttaagcagtggtatcaacgcagagtacnnagtggaganncgacaaganntttttttttttttttttttttttttttttt

SEQ ID NO: 8105 - DNA, 84 bp, Artificial
  Barcode component
  misc_feature (33)..(34): n is a, c, g, or t
  misc_feature (43)..(44): n is a, c, g, or t
  misc_feature (53)..(54): n is a, c, g, or t
tttttttaagcagtggtatcaacgcagagtacnnagtggaganncgaagtganntttttttttttttttttttttttttttttt

SEQ ID NO: 8106 - DNA, 84 bp, Artificial
  Barcode component
  misc_feature (33)..(34): n is a, c, g, or t
  misc_feature (43)..(44): n is a, c, g, or t
  misc_feature (53)..(54): n is a, c, g, or t
tttttttaagcagtggtatcaacgcagagtacnnagtggagannagctggtanntttttttttttttttttttttttttttttt

SEQ ID NO: 8107 - DNA, 84 bp, Artificial
  Barcode component
  misc_feature (33)..(34): n is a, c, g, or t
  misc_feature (43)..(44): n is a, c, g, or t
  misc_feature (53)..(54): n is a, c, g, or t
tttttttaagcagtggtatcaacgcagagtacnnagtggagannaactaggcnntttttttttttttttttttttttttttttt

SEQ ID NO: 8108 - DNA, 84 bp, Artificial
  Barcode component
  misc_feature (33)..(34): n is a, c, g, or t
  misc_feature (43)..(44): n is a, c, g, or t
  misc_feature (53)..(54): n is a, c, g, or t
tttttttaagcagtggtatcaacgcagagtacnnagtggaganncagcaagtnntttttttttttttttttttttttttttttt

SEQ ID NO: 8109 - DNA, 84 bp, Artificial
  Barcode component
  misc_feature (33)..(34): n is a, c, g, or t
  misc_feature (43)..(44): n is a, c, g, or t
  misc_feature (53)..(54): n is a, c, g, or t
tttttttaagcagtggtatcaacgcagagtacnnagtggagannacgaggtanntttttttttttttttttttttttttttttt

SEQ ID NO: 8110 - DNA, 84 bp, Artificial
  Barcode component
  misc_feature (33)..(34): n is a, c, g, or t
  misc_feature (43)..(44): n is a, c, g, or t
  misc_feature (53)..(54): n is a, c, g, or t
tttttttaagcagtggtatcaacgcagagtacnnagtggaganncatcttccnntttttttttttttttttttttttttttttt

SEQ ID NO: 8111 - DNA, 84 bp, Artificial
  Barcode component
  misc_feature (33)..(34): n is a, c, g, or t
  misc_feature (43)..(44): n is a, c, g, or t
  misc_feature (53)..(54): n is a, c, g, or t
tttttttaagcagtggtatcaacgcagagtacnnagtggaganncctgaatcnntttttttttttttttttttttttttttttt

SEQ ID NO: 8112 - DNA, 84 bp, Artificial
  Barcode component
  misc_feature (33)..(34): n is a, c, g, or t
  misc_feature (43)..(44): n is a, c, g, or t
  misc_feature (53)..(54): n is a, c, g, or t
tttttttaagcagtggtatcaacgcagagtacnnagtggaganntgcagactnntttttttttttttttttttttttttttttt

SEQ ID NO: 8113 - DNA, 84 bp, Artificial
  Barcode component
  misc_feature (33)..(34): n is a, c, g, or t
  misc_feature (43)..(44): n is a, c, g, or t
  misc_feature (53)..(54): n is a, c, g, or t
tttttttaagcagtggtatcaacgcagagtacnnagtggagannagatgtggnntttttttttttttttttttttttttttttt

SEQ ID NO: 8114 - DNA, 84 bp, Artificial
  Barcode component
  misc_feature (33)..(34): n is a, c, g, or t
  misc_feature (43)..(44): n is a, c, g, or t
  misc_feature (53)..(54): n is a, c, g, or t
tttttttaagcagtggtatcaacgcagagtacnnagtggagannagttcgacnntttttttttttttttttttttttttttttt

SEQ ID NO: 8115 - DNA, 84 bp, Artificial
  Barcode component
  misc_feature (33)..(34): n is a, c, g, or t
  misc_feature (43)..(44): n is a, c, g, or t
  misc_feature (53)..(54): n is a, c, g, or t
tttttttaagcagtggtatcaacgcagagtacnnagtggagannacaacctcnntttttttttttttttttttttttttttttt

SEQ ID NO: 8116 - DNA, 84 bp, Artificial
  Barcode component
  misc_feature (33)..(34): n is a, c, g, or t
  misc_feature (43)..(44): n is a, c, g, or t
  misc_feature (53)..(54): n is a, c, g, or t
tttttttaagcagtggtatcaacgcagagtacnnagtggaganncatggtagnntttttttttttttttttttttttttttttt

SEQ ID NO: 8117 - DNA, 84 bp, Artificial
  Barcode component
  misc_feature (33)..(34): n is a, c, g, or t
  misc_feature (43)..(44): n is a, c, g, or t
  misc_feature (53)..(54): n is a, c, g, or t
tttttttaagcagtggtatcaacgcagagtacnnagtggaganncgtatctcnntttttttttttttttttttttttttttttt

SEQ ID NO: 8118 - DNA, 84 bp, Artificial
  Barcode component
  misc_feature (33)..(34): n is a, c, g, or t
  misc_feature (43)..(44): n is a, c, g, or t
  misc_feature (53)..(54): n is a, c, g, or t
tttttttaagcagtggtatcaacgcagagtacnnagtggaganncctagttcnntttttttttttttttttttttttttttttt

SEQ ID NO: 8119 - DNA, 84 bp, Artificial
  Barcode component
  misc_feature (33)..(34): n is a, c, g, or t
  misc_feature (43)..(44): n is a, c, g, or t
  misc_feature (53)..(54): n is a, c, g, or t
tttttttaagcagtggtatcaacgcagagtacnnagtggaganncaagagtcnntttttttttttttttttttttttttttttt

SEQ ID NO: 8120 - DNA, 84 bp, Artificial
  Barcode component
  misc_feature (33)..(34): n is a, c, g, or t
  misc_feature (43)..(44): n is a, c, g, or t
  misc_feature (53)..(54): n is a, c, g, or t
tttttttaagcagtggtatcaacgcagagtacnntagtagccnnaatcggcanntttttttttttttttttttttttttttttt

SEQ ID NO: 8121 - DNA, 84 bp, Artificial
  Barcode component
  misc_feature (33)..(34): n is a, c, g, or t
  misc_feature (43)..(44): n is a, c, g, or t
  misc_feature (53)..(54): n is a, c, g, or t
tttttttaagcagtggtatcaacgcagagtacnntagtagccnntacggcatnntttttttttttttttttttttttttttttt

SEQ ID NO: 8122 - DNA, 84 bp, Artificial
  Barcode component
  misc_feature (33)..(34): n is a, c, g, or t
  misc_feature (43)..(44): n is a, c, g, or t
  misc_feature (53)..(54): n is a, c, g, or t
tttttttaagcagtggtatcaacgcagagtacnntagtagccnnttggatcgnntttttttttttttttttttttttttttttt

SEQ ID NO: 8123 - DNA, 84 bp, Artificial
  Barcode component
  misc_feature (33)..(34): n is a, c, g, or t
  misc_feature (43)..(44): n is a, c, g, or t
  misc_feature (53)..(54): n is a, c, g, or t
tttttttaagcagtggtatcaacgcagagtacnntagtagccnntggaacganntttttttttttttttttttttttttttttt

SEQ ID NO: 8124 - DNA, 84 bp, Artificial
  Barcode component
  misc_feature (33)..(34): n is a, c, g, or t
  misc_feature (43)..(44): n is a, c, g, or t
  misc_feature (53)..(54): n is a, c, g, or t
tttttttaagcagtggtatcaacgcagagtacnntagtagccnnggcaatcanntttttttttttttttttttttttttttttt

SEQ ID NO: 8125 - DNA, 84 bp, Artificial
  Barcode component
  misc_feature (33)..(34): n is a, c, g, or t
  misc_feature (43)..(44): n is a, c, g, or t
  misc_feature (53)..(54): n is a, c, g, or t
tttttttaagcagtggtatcaacgcagagtacnntagtagccnngaatccganntttttttttttttttttttttttttttttt

SEQ ID NO: 8126 - DNA, 84 bp, Artificial
  Barcode component
  misc_feature (33)..(34): n is a, c, g, or t
  misc_feature (43)..(44): n is a, c, g, or t
  misc_feature (53)..(54): n is a, c, g, or t
tttttttaagcagtggtatcaacgcagagtacnntagtagccnnttacggtgnntttttttttttttttttttttttttttttt

SEQ ID NO: 8127 - DNA, 84 bp, Artificial
  Barcode component
  misc_feature (33)..(34): n is a, c, g, or t
  misc_feature (43)..(44): n is a, c, g, or t
  misc_feature (53)..(54): n is a, c, g, or t
tttttttaagcagtggtatcaacgcagagtacnntagtagccnncatatcggnntttttttttttttttttttttttttttttt

SEQ ID NO: 8128 - DNA, 84 bp, Artificial
  Barcode component
  misc_feature (33)..(34): n is a, c, g, or t
  misc_feature (43)..(44): n is a, c, g, or t
  misc_feature (53)..(54): n is a, c, g, or t
tttttttaagcagtggtatcaacgcagagtacnntagtagccnncttcggtanntttttttttttttttttttttttttttttt

SEQ ID NO: 8129 - DNA, 84 bp, Artificial
  Barcode component
  misc_feature (33)..(34): n is a, c, g, or t
  misc_feature (43)..(44): n is a, c, g, or t
  misc_feature (53)..(54): n is a, c, g, or t
tttttttaagcagtggtatcaacgcagagtacnntagtagccnntcctaacgnntttttttttttttttttttttttttttttt

SEQ ID NO: 8130 - DNA, 84 bp, Artificial
  Barcode component
  misc_feature (33)..(34): n is a, c, g, or t
  misc_feature (43)..(44): n is a, c, g, or t
  misc_feature (53)..(54): n is a, c, g, or t
tttttttaagcagtggtatcaacgcagagtacnntagtagccnngtaagccanntttttttttttttttttttttttttttttt

SEQ ID NO: 8131 - DNA, 84 bp, Artificial
  Barcode component
  misc_feature (33)..(34): n is a, c, g, or t
  misc_feature (43)..(44): n is a, c, g, or t
  misc_feature (53)..(54): n is a, c, g, or t
tttttttaagcagtggtatcaacgcagagtacnntagtagccnntaaggtggnntttttttttttttttttttttttttttttt

SEQ ID NO: 8132 - DNA, 84 bp, Artificial
  Barcode component
  misc_feature (33)..(34): n is a, c, g, or t
  misc_feature (43)..(44): n is a, c, g, or t
  misc_feature (53)..(54): n is a, c, g, or t
tttttttaagcagtggtatcaacgcagagtacnntagtagccnnggtaagctnntttttttttttttttttttttttttttttt

SEQ ID NO: 8133 - DNA, 84 bp, Artificial
  Barcode component
  misc_feature (33)..(34): n is a, c, g, or t
  misc_feature (43)..(44): n is a, c, g, or t
  misc_feature (53)..(54): n is a, c, g, or t
tttttttaagcagtggtatcaacgcagagtacnntagtagccnntgtgtcganntttttttttttttttttttttttttttttt

SEQ ID NO: 8134 - DNA, 84 bp, Artificial
  Barcode component
  misc_feature (33)..(34): n is a, c, g, or t
  misc_feature (43)..(44): n is a, c, g, or t
  misc_feature (53)..(54): n is a, c, g, or t
tttttttaagcagtggtatcaacgcagagtacnntagtagccnngagcatganntttttttttttttttttttttttttttttt

SEQ ID NO: 8135 - DNA, 84 bp, Artificial
  Barcode component
  misc_feature (33)..(34): n is a, c, g, or t
  misc_feature (43)..(44): n is a, c, g, or t
  misc_feature (53)..(54): n is a, c, g, or t
tttttttaagcagtggtatcaacgcagagtacnntagtagccnntcgaagtcnntttttttttttttttttttttttttttttt

SEQ ID NO: 8136 - DNA, 84 bp, Artificial
  Barcode component
  misc_feature (33)..(34): n is a, c, g, or t
  misc_feature (43)..(44): n is a, c, g, or t
  misc_feature (53)..(54): n is a, c, g, or t
tttttttaagcagtggtatcaacgcagagtacnntagtagccnnggtgaacanntttttttttttttttttttttttttttttt

SEQ ID NO: 8137 - DNA, 84 bp, Artificial
  Barcode component
  misc_feature (33)..(34): n is a, c, g, or t
  misc_feature (43)..(44): n is a, c, g, or t
  misc_feature (53)..(54): n is a, c, g, or t
tttttttaagcagtggtatcaacgcagagtacnntagtagccnnacatgcacnntttttttttttttttttttttttttttttt

SEQ ID NO: 8138 - DNA, 84 bp, Artificial
  Barcode component
  misc_feature (33)..(34): n is a, c, g, or t
  misc_feature (43)..(44): n is a, c, g, or t
  misc_feature (53)..(54): n is a, c, g, or t
tttttttaagcagtggtatcaacgcagagtacnntagtagccnnccaacagtnntttttttttttttttttttttttttttttt

SEQ ID NO: 8139 - DNA, 84 bp, Artificial
  Barcode component
  misc_feature (33)..(34): n is a, c, g, or t
  misc_feature (43)..(44): n is a, c, g, or t
  misc_feature (53)..(54): n is a, c, g, or t
tttttttaagcagtggtatcaacgcagagtacnntagtagccnnagaacagcnntttttttttttttttttttttttttttttt

SEQ ID NO: 8140 - DNA, 84 bp, Artificial
  Barcode component
  misc_feature (33)..(34): n is a, c, g, or t
  misc_feature (43)..(44): n is a, c, g, or t
  misc_feature (53)..(54): n is a, c, g, or t
tttttttaagcagtggtatcaacgcagagtacnntagtagccnngaacacgtnntttttttttttttttttttttttttttttt

SEQ ID NO: 8141 - DNA, 84 bp, Artificial
  Barcode component
  misc_feature (33)..(34): n is a, c, g, or t
  misc_feature (43)..(44): n is a, c, g, or t
  misc_feature (53)..(54): n is a, c, g, or t
tttttttaagcagtggtatcaacgcagagtacnntagtagccnnggtcttcanntttttttttttttttttttttttttttttt

SEQ ID NO: 8142 - DNA, 84 bp, Artificial
  Barcode component
  misc_feature (33)..(34): n is a, c, g, or t
  misc_feature (43)..(44): n is a, c, g, or t
  misc_feature (53)..(54): n is a, c, g, or t
tttttttaagcagtggtatcaacgcagagtacnntagtagccnnaggttcagnntttttttttttttttttttttttttttttt

SEQ ID NO: 8143 - DNA, 84 bp, Artificial
  Barcode component
  misc_feature (33)..(34): n is a, c, g, or t
  misc_feature (43)..(44): n is a, c, g, or t
  misc_feature (53)..(54): n is a, c, g, or t
tttttttaagcagtggtatcaacgcagagtacnntagtagccnnctagagcanntttttttttttttttttttttttttttttt

SEQ ID NO: 8144 - DNA, 84 bp, Artificial
  Barcode component
  misc_feature (33)..(34): n is a, c, g, or t
  misc_feature (43)..(44): n is a, c, g, or t
  misc_feature (53)..(54): n is a, c, g, or t
tttttttaagcagtggtatcaacgcagagtacnntagtagccnncttctagcnntttttttttttttttttttttttttttttt

SEQ ID NO: 8145 - DNA, 84 bp, Artificial
  Barcode component
  misc_feature (33)..(34): n is a, c, g, or t
  misc_feature (43)..(44): n is a, c, g, or t
  misc_feature (53)..(54): n is a, c, g, or t
tttttttaagcagtggtatcaacgcagagtacnntagtagccnngagtaacgnntttttttttttttttttttttttttttttt

SEQ ID NO: 8146 - DNA, 84 bp, Artificial
  Barcode component
  misc_feature (33)..(34): n is a, c, g, or t
  misc_feature (43)..(44): n is a, c, g, or t
  misc_feature (53)..(54): n is a, c, g, or t
tttttttaagcagtggtatcaacgcagagtacnntagtagccnnctaagaggnntttttttttttttttttttttttttttttt

SEQ ID NO: 8147 - DNA, 84 bp, Artificial
  Barcode component
  misc_feature (33)..(34): n is a, c, g, or t
  misc_feature (43)..(44): n is a, c, g, or t
  misc_feature (53)..(54): n is a, c, g, or t
tttttttaagcagtggtatcaacgcagagtacnntagtagccnnacgtgtagnntttttttttttttttttttttttttttttt

SEQ ID NO: 8148 - DNA, 84 bp, Artificial
  Barcode component
  misc_feature (33)..(34): n is a, c, g, or t
  misc_feature (43)..(44): n is a, c, g, or t
  misc_feature (53)..(54): n is a, c, g, or t
tttttttaagcagtggtatcaacgcagagtacnntagtagccnnactacaggnntttttttttttttttttttttttttttttt

SEQ ID NO: 8149 - DNA, 84 bp, Artificial
  Barcode component
  misc_feature (33)..(34): n is a, c, g, or t
  misc_feature (43)..(44): n is a, c, g, or t
  misc_feature (53)..(54): n is a, c, g, or t
tttttttaagcagtggtatcaacgcagagtacnntagtagccnntacaggtcnntttttttttttttttttttttttttttttt

SEQ ID NO: 8150 - DNA, 84 bp, Artificial
  Barcode component
  misc_feature (33)..(34): n is a, c, g, or t
  misc_feature (43)..(44): n is a, c, g, or t
  misc_feature (53)..(54): n is a, c, g, or t
tttttttaagcagtggtatcaacgcagagtacnntagtagccnnctcacatgnntttttttttttttttttttttttttttttt

SEQ ID NO: 8151 - DNA, 84 bp, Artificial
  Barcode component
  misc_feature (33)..(34): n is a, c, g, or t
  misc_feature (43)..(44): n is a, c, g, or t
  misc_feature (53)..(54): n is a, c, g, or t
tttttttaagcagtggtatcaacgcagagtacnntagtagccnnactaggagnntttttttttttttttttttttttttttttt

SEQ ID NO: 8152 - DNA, 84 bp, Artificial
  Barcode component
  misc_feature (33)..(34): n is a, c, g, or t
  misc_feature (43)..(44): n is a, c, g, or t
  misc_feature (53)..(54): n is a, c, g, or t
tttttttaagcagtggtatcaacgcagagtacnntagtagccnnccatagganntttttttttttttttttttttttttttttt

SEQ ID NO: 8153 - DNA, 84 bp, Artificial
  Barcode component
  misc_feature (33)..(34): n is a, c, g, or t
  misc_feature (43)..(44): n is a, c, g, or t
  misc_feature (53)..(54): n is a, c, g, or t
tttttttaagcagtggtatcaacgcagagtacnntagtagccnnggagaatcnntttttttttttttttttttttttttttttt

SEQ ID NO: 8154 - DNA, 84 bp, Artificial
  Barcode component
  misc_feature (33)..(34): n is a, c, g, or t
  misc_feature (43)..(44): n is a, c, g, or t
  misc_feature (53)..(54): n is a, c, g, or t
tttttttaagcagtggtatcaacgcagagtacnntagtagccnngccaagaanntttttttttttttttttttttttttttttt

SEQ ID NO: 8155 - DNA, 84 bp, Artificial
  Barcode component
  misc_feature (33)..(34): n is a, c, g, or t
  misc_feature (43)..(44): n is a, c, g, or t
  misc_feature (53)..(54): n is a, c, g, or t
tttttttaagcagtggtatcaacgcagagtacnntagtagccnnaaggcaagnntttttttttttttttttttttttttttttt

SEQ ID NO: 8156 - DNA, 84 bp, Artificial
  Barcode component
  misc_feature (33)..(34): n is a, c, g, or t
  misc_feature (43)..(44): n is a, c, g, or t
  misc_feature (53)..(54): n is a, c, g, or t
tttttttaagcagtggtatcaacgcagagtacnntagtagccnnaatgtcgcnntttttttttttttttttttttttttttttt

SEQ ID NO: 8157 - DNA, 84 bp, Artificial
  Barcode component
  misc_feature (33)..(34): n is a, c, g, or t
  misc_feature (43)..(44): n is a, c, g, or t
  misc_feature (53)..(54): n is a, c, g, or t
tttttttaagcagtggtatcaacgcagagtacnntagtagccnnatggaaccnntttttttttttttttttttttttttttttt

SEQ ID NO: 8158 - DNA, 84 bp, Artificial
  Barcode component
  misc_feature (33)..(34): n is a, c, g, or t
  misc_feature (43)..(44): n is a, c, g, or t
  misc_feature (53)..(54): n is a, c, g, or t
tttttttaagcagtggtatcaacgcagagtacnntagtagccnnagaggcatnntttttttttttttttttttttttttttttt

SEQ ID NO: 8159 - DNA, 84 bp, Artificial
  Barcode component
  misc_feature (33)..(34): n is a, c, g, or t
  misc_feature (43)..(44): n is a, c, g, or t
  misc_feature (53)..(54): n is a, c, g, or t
tttttttaagcagtggtatcaacgcagagtacnntagtagccnntgcatagcnntttttttttttttttttttttttttttttt

SEQ ID NO: 8160 - DNA, 84 bp, Artificial
  Barcode component
  misc_feature (33)..(34): n is a, c, g, or t
  misc_feature (43)..(44): n is a, c, g, or t
  misc_feature (53)..(54): n is a, c, g, or t
tttttttaagcagtggtatcaacgcagagtacnntagtagccnnctaacgganntttttttttttttttttttttttttttttt

SEQ ID NO: 8161 - DNA, 84 bp, Artificial
  Barcode component
  misc_feature (33)..(34): n is a, c, g, or t
  misc_feature (43)..(44): n is a, c, g, or t
  misc_feature (53)..(54): n is a, c, g, or t
tttttttaagcagtggtatcaacgcagagtacnntagtagccnntatcgaggnntttttttttttttttttttttttttttttt

SEQ ID NO: 8162 - DNA, 84 bp, Artificial
  Barcode component
  misc_feature (33)..(34): n is a, c, g, or t
  misc_feature (43)..(44): n is a, c, g, or t
  misc_feature (53)..(54): n is a, c, g, or t
tttttttaagcagtggtatcaacgcagagtacnntagtagccnncatagcctnntttttttttttttttttttttttttttttt

SEQ ID NO: 8163 - DNA, 84 bp, Artificial
  Barcode component
  misc_feature (33)..(34): n is a, c, g, or t
  misc_feature (43)..(44): n is a, c, g, or t
  misc_feature (53)..(54): n is a, c, g, or t
tttttttaagcagtggtatcaacgcagagtacnntagtagccnnatcgagacnntttttttttttttttttttttttttttttt

SEQ ID NO: 8164 - DNA, 84 bp, Artificial
  Barcode component
  misc_feature (33)..(34): n is a, c, g, or t
  misc_feature (43)..(44): n is a, c, g, or t
  misc_feature (53)..(54): n is a, c, g, or t
tttttttaagcagtggtatcaacgcagagtacnntagtagccnnggaagagtnntttttttttttttttttttttttttttttt

SEQ ID NO: 8165 - DNA, 84 bp, Artificial
  Barcode component
  misc_feature (33)..(34): n is a, c, g, or t
  misc_feature (43)..(44): n is a, c, g, or t
  misc_feature (53)..(54): n is a, c, g, or t
tttttttaagcagtggtatcaacgcagagtacnntagtagccnnccaagtagnntttttttttttttttttttttttttttttt

SEQ ID NO: 8166 - DNA, 84 bp, Artificial
  Barcode component
  misc_feature (33)..(34): n is a, c, g, or t
  misc_feature (43)..(44): n is a, c, g, or t
  misc_feature (53)..(54): n is a, c, g, or t
tttttttaagcagtggtatcaacgcagagtacnntagtagccnnctgaacagnntttttttttttttttttttttttttttttt

SEQ ID NO: 8167 - DNA, 84 bp, Artificial
  Barcode component
  misc_feature (33)..(34): n is a, c, g, or t
  misc_feature (43)..(44): n is a, c, g, or t
  misc_feature (53)..(54): n is a, c, g, or t
tttttttaagcagtggtatcaacgcagagtacnntagtagccnngtaggttcnntttttttttttttttttttttttttttttt

SEQ ID NO: 8168 - DNA, 84 bp, Artificial
  Barcode component
  misc_feature (33)..(34): n is a, c, g, or t
  misc_feature (43)..(44): n is a, c, g, or t
  misc_feature (53)..(54): n is a, c, g, or t
tttttttaagcagtggtatcaacgcagagtacnntagtagccnngtatggacnntttttttttttttttttttttttttttttt

SEQ ID NO: 8169 - DNA, 84 bp, Artificial
  Barcode component
  misc_feature (33)..(34): n is a, c, g, or t
  misc_feature (43)..(44): n is a, c, g, or t
  misc_feature (53)..(54): n is a, c, g, or t
tttttttaagcagtggtatcaacgcagagtacnntagtagccnntcgcaacanntttttttttttttttttttttttttttttt

SEQ ID NO: 8170 - DNA, 84 bp, Artificial
  Barcode component
  misc_feature (33)..(34): n is a, c, g, or t
  misc_feature (43)..(44): n is a, c, g, or t
  misc_feature (53)..(54): n is a, c, g, or t
tttttttaagcagtggtatcaacgcagagtacnntagtagccnnccgctaatnntttttttttttttttttttttttttttttt

SEQ ID NO: 8171 - DNA, 84 bp, Artificial
  Barcode component
  misc_feature (33)..(34): n is a, c, g, or t
  misc_feature (43)..(44): n is a, c, g, or t
  misc_feature (53)..(54): n is a, c, g, or t
tttttttaagcagtggtatcaacgcagagtacnntagtagccnngattcgcanntttttttttttttttttttttttttttttt

SEQ ID NO: 8172 - DNA, 84 bp, Artificial
  Barcode component
  misc_feature (33)..(34): n is a, c, g, or t
  misc_feature (43)..(44): n is a, c, g, or t
  misc_feature (53)..(54): n is a, c, g, or t
tttttttaagcagtggtatcaacgcagagtacnntagtagccnncgatggaanntttttttttttttttttttttttttttttt

SEQ ID NO: 8173 - DNA, 84 bp, Artificial
  Barcode component
  misc_feature (33)..(34): n is a, c, g, or t
  misc_feature (43)..(44): n is a, c, g, or t
  misc_feature (53)..(54): n is a, c, g, or t
tttttttaagcagtggtatcaacgcagagtacnntagtagccnnagcaagganntttttttttttttttttttttttttttttt

SEQ ID NO: 8174 - DNA, 84 bp, Artificial
  Barcode component
  misc_feature (33)..(34): n is a, c, g, or t
  misc_feature (43)..(44): n is a, c, g, or t
  misc_feature (53)..(54): n is a, c, g, or t
tttttttaagcagtggtatcaacgcagagtacnntagtagccnncgtagcaanntttttttttttttttttttttttttttttt

SEQ ID NO: 8175 - DNA, 84 bp, Artificial
  Barcode component
  misc_feature (33)..(34): n is a, c, g, or t
  misc_feature (43)..(44): n is a, c, g, or t
  misc_feature (53)..(54): n is a, c, g, or t
tttttttaagcagtggtatcaacgcagagtacnntagtagccnntggcagtanntttttttttttttttttttttttttttttt

SEQ ID NO: 8176 - DNA, 84 bp, Artificial
  Barcode component
  misc_feature (33)..(34): n is a, c, g, or t
  misc_feature (43)..(44): n is a, c, g, or t
  misc_feature (53)..(54): n is a, c, g, or t
tttttttaagcagtggtatcaacgcagagtacnntagtagccnncggtagttnntttttttttttttttttttttttttttttt

SEQ ID NO: 8177 - DNA, 84 bp, Artificial
  Barcode component
  misc_feature (33)..(34): n is a, c, g, or t
  misc_feature (43)..(44): n is a, c, g, or t
  misc_feature (53)..(54): n is a, c, g, or t
tttttttaagcagtggtatcaacgcagagtacnntagtagccnntgacttcgnntttttttttttttttttttttttttttttt

SEQ ID NO: 8178 - DNA, 84 bp, Artificial
  Barcode component
  misc_feature (33)..(34): n is a, c, g, or t
  misc_feature (43)..(44): n is a, c, g, or t
  misc_feature (53)..(54): n is a, c, g, or t
tttttttaagcagtggtatcaacgcagagtacnntagtagccnngagtgcaanntttttttttttttttttttttttttttttt

SEQ ID NO: 8179 - DNA, 84 bp, Artificial
  Barcode component
  misc_feature (33)..(34): n is a, c, g, or t
  misc_feature (43)..(44): n is a, c, g, or t
  misc_feature (53)..(54): n is a, c, g, or t
tttttttaagcagtggtatcaacgcagagtacnntagtagccnnacggtaacnntttttttttttttttttttttttttttttt

SEQ ID NO: 8180 - DNA, 84 bp, Artificial
  Barcode component
  misc_feature (33)..(34): n is a, c, g, or t
  misc_feature (43)..(44): n is a, c, g, or t
  misc_feature (53)..(54): n is a, c, g, or t
tttttttaagcagtggtatcaacgcagagtacnntagtagccnnaagtggtgnntttttttttttttttttttttttttttttt

SEQ ID NO: 8181 - DNA, 84 bp, Artificial
  Barcode component
  misc_feature (33)..(34): n is a, c, g, or t
  misc_feature (43)..(44): n is a, c, g, or t
  misc_feature (53)..(54): n is a, c, g, or t
tttttttaagcagtggtatcaacgcagagtacnntagtagccnnggagacaanntttttttttttttttttttttttttttttt

SEQ ID NO: 8182 - DNA, 84 bp, Artificial
  Barcode component
  misc_feature (33)..(34): n is a, c, g, or t
  misc_feature (43)..(44): n is a, c, g, or t
  misc_feature (53)..(54): n is a, c, g, or t
tttttttaagcagtggtatcaacgcagagtacnntagtagccnntcaaggacnntttttttttttttttttttttttttttttt

SEQ ID NO: 8183 - DNA, 84 bp, Artificial
  Barcode component
  misc_feature (33)..(34): n is a, c, g, or t
  misc_feature (43)..(44): n is a, c, g, or t
  misc_feature (53)..(54): n is a, c, g, or t
tttttttaagcagtggtatcaacgcagagtacnntagtagccnnaagagagcnntttttttttttttttttttttttttttttt

SEQ ID NO: 8184 - DNA, 84 bp, Artificial
  Barcode component
  misc_feature (33)..(34): n is a, c, g, or t
  misc_feature (43)..(44): n is a, c, g, or t
  misc_feature (53)..(54): n is a, c, g, or t
tttttttaagcagtggtatcaacgcagagtacnntagtagccnncgagagatnntttttttttttttttttttttttttttttt

SEQ ID NO: 8185 - DNA, 84 bp, Artificial
  Barcode component
  misc_feature (33)..(34): n is a, c, g, or t
  misc_feature (43)..(44): n is a, c, g, or t
  misc_feature (53)..(54): n is a, c, g, or t
tttttttaagcagtggtatcaacgcagagtacnntagtagccnnacagatggnntttttttttttttttttttttttttttttt

SEQ ID NO: 8186 - DNA, 84 bp, Artificial
  Barcode component
  misc_feature (33)..(34): n is a, c, g, or t
  misc_feature (43)..(44): n is a, c, g, or t
  misc_feature (53)..(54): n is a, c, g, or t
tttttttaagcagtggtatcaacgcagagtacnntagtagccnnaggagtcanntttttttttttttttttttttttttttttt

SEQ ID NO: 8187 - DNA, 84 bp, Artificial
  Barcode component
  misc_feature (33)..(34): n is a, c, g, or t
  misc_feature (43)..(44): n is a, c, g, or t
  misc_feature (53)..(54): n is a, c, g, or t
tttttttaagcagtggtatcaacgcagagtacnntagtagccnncgtgttacnntttttttttttttttttttttttttttttt

SEQ ID NO: 8188 - DNA, 84 bp, Artificial
  Barcode component
  misc_feature (33)..(34): n is a, c, g, or t
  misc_feature (43)..(44): n is a, c, g, or t
  misc_feature (53)..(54): n is a, c, g, or t
tttttttaagcagtggtatcaacgcagagtacnntagtagccnntagtgtgcnntttttttttttttttttttttttttttttt

SEQ ID NO: 8189 - DNA, 84 bp, Artificial
  Barcode component
  misc_feature (33)..(34): n is a, c, g, or t
  misc_feature (43)..(44): n is a, c, g, or t
  misc_feature (53)..(54): n is a, c, g, or t
tttttttaagcagtggtatcaacgcagagtacnntagtagccnnctcatgacnntttttttttttttttttttttttttttttt

SEQ ID NO: 8190 - DNA, 84 bp, Artificial
  Barcode component
  misc_feature (33)..(34): n is a, c, g, or t
  misc_feature (43)..(44): n is a, c, g, or t
  misc_feature (53)..(54): n is a, c, g, or t
tttttttaagcagtggtatcaacgcagagtacnntagtagccnngtatccagnntttttttttttttttttttttttttttttt

SEQ ID NO: 8191 - DNA, 84 bp, Artificial
  Barcode component
  misc_feature (33)..(34): n is a, c, g, or t
  misc_feature (43)..(44): n is a, c, g, or t
  misc_feature (53)..(54): n is a, c, g, or t
tttttttaagcagtggtatcaacgcagagtacnntagtagccnnacgcctatnntttttttttttttttttttttttttttttt

SEQ ID NO: 8192 - DNA, 84 bp, Artificial
  Barcode component
  misc_feature (33)..(34): n is a, c, g, or t
  misc_feature (43)..(44): n is a, c, g, or t
  misc_feature (53)..(54): n is a, c, g, or t
tttttttaagcagtggtatcaacgcagagtacnntagtagccnnaacgacctnntttttttttttttttttttttttttttttt

SEQ ID NO: 8193 - DNA, 84 bp, Artificial
  Barcode component
  misc_feature (33)..(34): n is a, c, g, or t
  misc_feature (43)..(44): n is a, c, g, or t
  misc_feature (53)..(54): n is a, c, g, or t
tttttttaagcagtggtatcaacgcagagtacnntagtagccnnatcaggctnntttttttttttttttttttttttttttttt

SEQ ID NO: 8194 - DNA, 84 bp, Artificial
  Barcode component
  misc_feature (33)..(34): n is a, c, g, or t
  misc_feature (43)..(44): n is a, c, g, or t
  misc_feature (53)..(54): n is a, c, g, or t
tttttttaagcagtggtatcaacgcagagtacnntagtagccnncaagttcgnntttttttttttttttttttttttttttttt

SEQ ID NO: 8195 - DNA, 84 bp, Artificial
  Barcode component
  misc_feature (33)..(34): n is a, c, g, or t
  misc_feature (43)..(44): n is a, c, g, or t
  misc_feature (53)..(54): n is a, c, g, or t
tttttttaagcagtggtatcaacgcagagtacnntagtagccnntagccaganntttttttttttttttttttttttttttttt

SEQ ID NO: 8196 - DNA, 84 bp, Artificial
  Barcode component
  misc_feature (33)..(34): n is a, c, g, or t
  misc_feature (43)..(44): n is a, c, g, or t
  misc_feature (53)..(54): n is a, c, g, or t
tttttttaagcagtggtatcaacgcagagtacnntagtagccnncaatcacgnntttttttttttttttttttttttttttttt

SEQ ID NO: 8197 - DNA, 84 bp, Artificial
  Barcode component
  misc_feature (33)..(34): n is a, c, g, or t
  misc_feature (43)..(44): n is a, c, g, or t
  misc_feature (53)..(54): n is a, c, g, or t
tttttttaagcagtggtatcaacgcagagtacnntagtagccnngcaacaagnntttttttttttttttttttttttttttttt

SEQ ID NO: 8198 - DNA, 84 bp, Artificial
  Barcode component
  misc_feature (33)..(34): n is a, c, g, or t
  misc_feature (43)..(44): n is a, c, g, or t
  misc_feature (53)..(54): n is a, c, g, or t
tttttttaagcagtggtatcaacgcagagtacnntagtagccnncacgacaanntttttttttttttttttttttttttttttt

SEQ ID NO: 8199 - DNA, 84 bp, Artificial
  Barcode component
  misc_feature (33)..(34): n is a, c, g, or t
  misc_feature (43)..(44): n is a, c, g, or t
  misc_feature (53)..(54): n is a, c, g, or t
tttttttaagcagtggtatcaacgcagagtacnntagtagccnntacggaganntttttttttttttttttttttttttttttt

SEQ ID NO: 8200 - DNA, 84 bp, Artificial
  Barcode component
  misc_feature (33)..(34): n is a, c, g, or t
  misc_feature (43)..(44): n is a, c, g, or t
  misc_feature (53)..(54): n is a, c, g, or t
tttttttaagcagtggtatcaacgcagagtacnntagtagccnncgacaaganntttttttttttttttttttttttttttttt

SEQ ID NO: 8201 - DNA, 84 bp, Artificial
  Barcode component
  misc_feature (33)..(34): n is a, c, g, or t
  misc_feature (43)..(44): n is a, c, g, or t
  misc_feature (53)..(54): n is a, c, g, or t
tttttttaagcagtggtatcaacgcagagtacnntagtagccnncgaagtganntttttttttttttttttttttttttttttt

SEQ ID NO: 8202 - DNA, 84 bp, Artificial
  Barcode component
  misc_feature (33)..(34): n is a, c, g, or t
  misc_feature (43)..(44): n is a, c, g, or t
  misc_feature (53)..(54): n is a, c, g, or t
tttttttaagcagtggtatcaacgcagagtacnntagtagccnnagctggtanntttttttttttttttttttttttttttttt

SEQ ID NO: 8203 - DNA, 84 bp, Artificial
  Barcode component
  misc_feature (33)..(34): n is a, c, g, or t
  misc_feature (43)..(44): n is a, c, g, or t
  misc_feature (53)..(54): n is a, c, g, or t
tttttttaagcagtggtatcaacgcagagtacnntagtagccnnaactaggcnntttttttttttttttttttttttttttttt

SEQ ID NO: 8204 - DNA, 84 bp, Artificial
  Barcode component
  misc_feature (33)..(34): n is a, c, g, or t
  misc_feature (43)..(44): n is a, c, g, or t
  misc_feature (53)..(54): n is a, c, g, or t
tttttttaagcagtggtatcaacgcagagtacnntagtagccnncagcaagtnntttttttttttttttttttttttttttttt

SEQ ID NO: 8205 - DNA, 84 bp, Artificial
  Barcode component
  misc_feature (33)..(34): n is a, c, g, or t
  misc_feature (43)..(44): n is a, c, g, or t
  misc_feature (53)..(54): n is a, c, g, or t
tttttttaagcagtggtatcaacgcagagtacnntagtagccnnacgaggtanntttttttttttttttttttttttttttttt

SEQ ID NO: 8206 - DNA, 84 bp, Artificial
  Barcode component
  misc_feature (33)..(34): n is a, c, g, or t
  misc_feature (43)..(44): n is a, c, g, or t
  misc_feature (53)..(54): n is a, c, g, or t
tttttttaagcagtggtatcaacgcagagtacnntagtagccnncatcttccnntttttttttttttttttttttttttttttt

SEQ ID NO: 8207 - DNA, 84 bp, Artificial
  Barcode component
  misc_feature (33)..(34): n is a, c, g, or t
  misc_feature (43)..(44): n is a, c, g, or t
  misc_feature (53)..(54): n is a, c, g, or t
tttttttaagcagtggtatcaacgcagagtacnntagtagccnncctgaatcnntttttttttttttttttttttttttttttt

SEQ ID NO: 8208 - DNA, 84 bp, Artificial
  Barcode component
  misc_feature (33)..(34): n is a, c, g, or t
  misc_feature (43)..(44): n is a, c, g, or t
  misc_feature (53)..(54): n is a, c, g, or t
tttttttaagcagtggtatcaacgcagagtacnntagtagccnntgcagactnntttttttttttttttttttttttttttttt

SEQ ID NO: 8209 - DNA, 84 bp, Artificial
  Barcode component
  misc_feature (33)..(34): n is a, c, g, or t
  misc_feature (43)..(44): n is a, c, g, or t
  misc_feature (53)..(54): n is a, c, g, or t
tttttttaagcagtggtatcaacgcagagtacnntagtagccnnagatgtggnntttttttttttttttttttttttttttttt

SEQ ID NO: 8210 - DNA, 84 bp, Artificial
  Barcode component
  misc_feature (33)..(34): n is a, c, g, or t
  misc_feature (43)..(44): n is a, c, g, or t
  misc_feature (53)..(54): n is a, c, g, or t
tttttttaagcagtggtatcaacgcagagtacnntagtagccnnagttcgacnntttttttttttttttttttttttttttttt

SEQ ID NO: 8211 - DNA, 84 bp, Artificial
  Barcode component
  misc_feature (33)..(34): n is a, c, g, or t
  misc_feature (43)..(44): n is a, c, g, or t
  misc_feature (53)..(54): n is a, c, g, or t
tttttttaagcagtggtatcaacgcagagtacnntagtagccnnacaacctcnntttttttttttttttttttttttttttttt

SEQ ID NO: 8212 - DNA, 84 bp, Artificial
  Barcode component
  misc_feature (33)..(34): n is a, c, g, or t
  misc_feature (43)..(44): n is a, c, g, or t
  misc_feature (53)..(54): n is a, c, g, or t
tttttttaagcagtggtatcaacgcagagtacnntagtagccnncatggtagnntttttttttttttttttttttttttttttt

SEQ ID NO: 8213 - DNA, 84 bp, Artificial
  Barcode component
  misc_feature (33)..(34): n is a, c, g, or t
  misc_feature (43)..(44): n is a, c, g, or t
  misc_feature (53)..(54): n is a, c, g, or t
tttttttaagcagtggtatcaacgcagagtacnntagtagccnncgtatctcnntttttttttttttttttttttttttttttt

SEQ ID NO: 8214 - DNA, 84 bp, Artificial
  Barcode component
  misc_feature (33)..(34): n is a, c, g, or t
  misc_feature (43)..(44): n is a, c, g, or t
  misc_feature (53)..(54): n is a, c, g, or t
tttttttaagcagtggtatcaacgcagagtacnntagtagccnncctagttcnntttttttttttttttttttttttttttttt

SEQ ID NO: 8215 - DNA, 84 bp, Artificial
  Barcode component
  misc_feature (33)..(34): n is a, c, g, or t
  misc_feature (43)..(44): n is a, c, g, or t
  misc_feature (53)..(54): n is a, c, g, or t
tttttttaagcagtggtatcaacgcagagtacnntagtagccnncaagagtcnntttttttttttttttttttttttttttttt

SEQ ID NO: 8216 - DNA, 84 bp, Artificial
  Barcode component
  misc_feature (33)..(34): n is a, c, g, or t
  misc_feature (43)..(44): n is a, c, g, or t
  misc_feature (53)..(54): n is a, c, g, or t
tttttttaagcagtggtatcaacgcagagtacnngagatcagnnaatcggcanntttttttttttttttttttttttttttttt

SEQ ID NO: 8217 - DNA, 84 bp, Artificial
  Barcode component
  misc_feature (33)..(34): n is a, c, g, or t
  misc_feature (43)..(44): n is a, c, g, or t
  misc_feature (53)..(54): n is a, c, g, or t
tttttttaagcagtggtatcaacgcagagtacnngagatcagnntacggcatnntttttttttttttttttttttttttttttt

SEQ ID NO: 8218 - DNA, 84 bp, Artificial
  Barcode component
  misc_feature (33)..(34): n is a, c, g, or t
  misc_feature (43)..(44): n is a, c, g, or t
  misc_feature (53)..(54): n is a, c, g, or t
tttttttaagcagtggtatcaacgcagagtacnngagatcagnnttggatcgnntttttttttttttttttttttttttttttt

SEQ ID NO: 8219 - DNA, 84 bp, Artificial
  Barcode component
  misc_feature (33)..(34): n is a, c, g, or t
  misc_feature (43)..(44): n is a, c, g, or t
  misc_feature (53)..(54): n is a, c, g, or t
tttttttaagcagtggtatcaacgcagagtacnngagatcagnntggaacganntttttttttttttttttttttttttttttt

SEQ ID NO: 8220 - DNA, 84 bp, Artificial
  Barcode component
  misc_feature (33)..(34): n is a, c, g, or t
  misc_feature (43)..(44): n is a, c, g, or t
  misc_feature (53)..(54): n is a, c, g, or t
tttttttaagcagtggtatcaacgcagagtacnngagatcagnnggcaatcanntttttttttttttttttttttttttttttt

SEQ ID NO: 8221 - DNA, 84 bp, Artificial
  Barcode component
  misc_feature (33)..(34): n is a, c, g, or t
  misc_feature (43)..(44): n is a, c, g, or t
  misc_feature (53)..(54): n is a, c, g, or t
tttttttaagcagtggtatcaacgcagagtacnngagatcagnngaatccganntttttttttttttttttttttttttttttt

SEQ ID NO: 8222 - DNA, 84 bp, Artificial
  Barcode component
  misc_feature (33)..(34): n is a, c, g, or t
  misc_feature (43)..(44): n is a, c, g, or t
  misc_feature (53)..(54): n is a, c, g, or t
tttttttaagcagtggtatcaacgcagagtacnngagatcagnnttacggtgnntttttttttttttttttttttttttttttt

SEQ ID NO: 8223 - DNA, 84 bp, Artificial
  Barcode component
  misc_feature (33)..(34): n is a, c, g, or t
  misc_feature (43)..(44): n is a, c, g, or t
  misc_feature (53)..(54): n is a, c, g, or t
tttttttaagcagtggtatcaacgcagagtacnngagatcagnncatatcggnntttttttttttttttttttttttttttttt

SEQ ID NO: 8224 - DNA, 84 bp, Artificial
  Barcode component
  misc_feature (33)..(34): n is a, c, g, or t
  misc_feature (43)..(44): n is a, c, g, or t
  misc_feature (53)..(54): n is a, c, g, or t
tttttttaagcagtggtatcaacgcagagtacnngagatcagnncttcggtanntttttttttttttttttttttttttttttt

SEQ ID NO: 8225 - DNA, 84 bp, Artificial
  Barcode component
  misc_feature (33)..(34): n is a, c, g, or t
  misc_feature (43)..(44): n is a, c, g, or t
  misc_feature (53)..(54): n is a, c, g, or t
tttttttaagcagtggtatcaacgcagagtacnngagatcagnntcctaacgnntttttttttttttttttttttttttttttt

SEQ ID NO: 8226 - DNA, 84 bp, Artificial
  Barcode component
  misc_feature (33)..(34): n is a, c, g, or t
  misc_feature (43)..(44): n is a, c, g, or t
  misc_feature (53)..(54): n is a, c, g, or t
tttttttaagcagtggtatcaacgcagagtacnngagatcagnngtaagccanntttttttttttttttttttttttttttttt

SEQ ID NO: 8227 - DNA, 84 bp, Artificial
  Barcode component
  misc_feature (33)..(34): n is a, c, g, or t
  misc_feature (43)..(44): n is a, c, g, or t
  misc_feature (53)..(54): n is a, c, g, or t
tttttttaagcagtggtatcaacgcagagtacnngagatcagnntaaggtggnntttttttttttttttttttttttttttttt

SEQ ID NO: 8228 - DNA, 84 bp, Artificial
  Barcode component
  misc_feature (33)..(34): n is a, c, g, or t
  misc_feature (43)..(44): n is a, c, g, or t
  misc_feature (53)..(54): n is a, c, g, or t
tttttttaagcagtggtatcaacgcagagtacnngagatcagnnggtaagctnntttttttttttttttttttttttttttttt

SEQ ID NO: 8229 - DNA, 84 bp, Artificial
  Barcode component
  misc_feature (33)..(34): n is a, c, g, or t
  misc_feature (43)..(44): n is a, c, g, or t
  misc_feature (53)..(54): n is a, c, g, or t
tttttttaagcagtggtatcaacgcagagtacnngagatcagnntgtgtcganntttttttttttttttttttttttttttttt

SEQ ID NO: 8230 - DNA, 84 bp, Artificial
  Barcode component
  misc_feature (33)..(34): n is a, c, g, or t
  misc_feature (43)..(44): n is a, c, g, or t
  misc_feature (53)..(54): n is a, c, g, or t
tttttttaagcagtggtatcaacgcagagtacnngagatcagnngagcatganntttttttttttttttttttttttttttttt

SEQ ID NO: 8231 - DNA, 84 bp, Artificial
  Barcode component
  misc_feature (33)..(34): n is a, c, g, or t
  misc_feature (43)..(44): n is a, c, g, or t
  misc_feature (53)..(54): n is a, c, g, or t
tttttttaagcagtggtatcaacgcagagtacnngagatcagnntcgaagtcnntttttttttttttttttttttttttttttt

SEQ ID NO: 8232 - DNA, 84 bp, Artificial
  Barcode component
  misc_feature (33)..(34): n is a, c, g, or t
  misc_feature (43)..(44): n is a, c, g, or t
  misc_feature (53)..(54): n is a, c, g, or t
tttttttaagcagtggtatcaacgcagagtacnngagatcagnnggtgaacanntttttttttttttttttttttttttttttt

SEQ ID NO: 8233 - DNA, 84 bp, Artificial
  Barcode component
  misc_feature (33)..(34): n is a, c, g, or t
  misc_feature (43)..(44): n is a, c, g, or t
  misc_feature (53)..(54): n is a, c, g, or t
tttttttaagcagtggtatcaacgcagagtacnngagatcagnnacatgcacnntttttttttttttttttttttttttttttt

SEQ ID NO: 8234 - DNA, 84 bp, Artificial
  Barcode component
  misc_feature (33)..(34): n is a, c, g, or t
  misc_feature (43)..(44): n is a, c, g, or t
  misc_feature (53)..(54): n is a, c, g, or t
tttttttaagcagtggtatcaacgcagagtacnngagatcagnnccaacagtnntttttttttttttttttttttttttttttt

SEQ ID NO: 8235 - DNA, 84 bp, Artificial
  Barcode component
  misc_feature (33)..(34): n is a, c, g, or t
  misc_feature (43)..(44): n is a, c, g, or t
  misc_feature (53)..(54): n is a, c, g, or t
tttttttaagcagtggtatcaacgcagagtacnngagatcagnnagaacagcnntttttttttttttttttttttttttttttt

SEQ ID NO: 8236 - DNA, 84 bp, Artificial
  Barcode component
  misc_feature (33)..(34): n is a, c, g, or t
  misc_feature (43)..(44): n is a, c, g, or t
  misc_feature (53)..(54): n is a, c, g, or t
tttttttaagcagtggtatcaacgcagagtacnngagatcagnngaacacgtnntttttttttttttttttttttttttttttt

SEQ ID NO: 8237 - DNA, 84 bp, Artificial
  Barcode component
  misc_feature (33)..(34): n is a, c, g, or t
  misc_feature (43)..(44): n is a, c, g, or t
  misc_feature (53)..(54): n is a, c, g, or t
tttttttaagcagtggtatcaacgcagagtacnngagatcagnnggtcttcanntttttttttttttttttttttttttttttt

SEQ ID NO: 8238 - DNA, 84 bp, Artificial
  Barcode component
  misc_feature (33)..(34): n is a, c, g, or t
  misc_feature (43)..(44): n is a, c, g, or t
  misc_feature (53)..(54): n is a, c, g, or t
tttttttaagcagtggtatcaacgcagagtacnngagatcagnnaggttcagnntttttttttttttttttttttttttttttt

SEQ ID NO: 8239 - DNA, 84 bp, Artificial
  Barcode component
  misc_feature (33)..(34): n is a, c, g, or t
  misc_feature (43)..(44): n is a, c, g, or t
  misc_feature (53)..(54): n is a, c, g, or t
tttttttaagcagtggtatcaacgcagagtacnngagatcagnnctagagcanntttttttttttttttttttttttttttttt

SEQ ID NO: 8240 - DNA, 84 bp, Artificial
  Barcode component
  misc_feature (33)..(34): n is a, c, g, or t
  misc_feature (43)..(44): n is a, c, g, or t
  misc_feature (53)..(54): n is a, c, g, or t
tttttttaagcagtggtatcaacgcagagtacnngagatcagnncttctagcnntttttttttttttttttttttttttttttt

SEQ ID NO: 8241 - DNA, 84 bp, Artificial
  Barcode component
  misc_feature (33)..(34): n is a, c, g, or t
  misc_feature (43)..(44): n is a, c, g, or t
  misc_feature (53)..(54): n is a, c, g, or t
tttttttaagcagtggtatcaacgcagagtacnngagatcagnngagtaacgnntttttttttttttttttttttttttttttt

SEQ ID NO: 8242 - DNA, 84 bp, Artificial
  Barcode component
  misc_feature (33)..(34): n is a, c, g, or t
  misc_feature (43)..(44): n is a, c, g, or t
  misc_feature (53)..(54): n is a, c, g, or t
tttttttaagcagtggtatcaacgcagagtacnngagatcagnnctaagaggnntttttttttttttttttttttttttttttt

SEQ ID NO: 8243 - DNA, 84 bp, Artificial
  Barcode component
  misc_feature (33)..(34): n is a, c, g, or t
  misc_feature (43)..(44): n is a, c, g, or t
  misc_feature (53)..(54): n is a, c, g, or t
tttttttaagcagtggtatcaacgcagagtacnngagatcagnnacgtgtagnntttttttttttttttttttttttttttttt

SEQ ID NO: 8244 - DNA, 84 bp, Artificial
  Barcode component
  misc_feature (33)..(34): n is a, c, g, or t
  misc_feature (43)..(44): n is a, c, g, or t
  misc_feature (53)..(54): n is a, c, g, or t
tttttttaagcagtggtatcaacgcagagtacnngagatcagnnactacaggnntttttttttttttttttttttttttttttt

SEQ ID NO: 8245 - DNA, 84 bp, Artificial
  Barcode component
  misc_feature (33)..(34): n is a, c, g, or t
  misc_feature (43)..(44): n is a, c, g, or t
  misc_feature (53)..(54): n is a, c, g, or t
tttttttaagcagtggtatcaacgcagagtacnngagatcagnntacaggtcnntttttttttttttttttttttttttttttt

SEQ ID NO: 8246 - DNA, 84 bp, Artificial
  Barcode component
  misc_feature (33)..(34): n is a, c, g, or t
  misc_feature (43)..(44): n is a, c, g, or t
  misc_feature (53)..(54): n is a, c, g, or t
tttttttaagcagtggtatcaacgcagagtacnngagatcagnnctcacatgnntttttttttttttttttttttttttttttt

SEQ ID NO: 8247 - DNA, 84 bp, Artificial
  Barcode component
  misc_feature (33)..(34): n is a, c, g, or t
  misc_feature (43)..(44): n is a, c, g, or t
  misc_feature (53)..(54): n is a, c, g, or t
tttttttaagcagtggtatcaacgcagagtacnngagatcagnnactaggagnntttttttttttttttttttttttttttttt

SEQ ID NO: 8248 - DNA, 84 bp, Artificial
  Barcode component
  misc_feature (33)..(34): n is a, c, g, or t
  misc_feature (43)..(44): n is a, c, g, or t
  misc_feature (53)..(54): n is a, c, g, or t
tttttttaagcagtggtatcaacgcagagtacnngagatcagnnccatagganntttttttttttttttttttttttttttttt

SEQ ID NO: 8249 - DNA, 84 bp, Artificial
  Barcode component
  misc_feature (33)..(34): n is a, c, g, or t
  misc_feature (43)..(44): n is a, c, g, or t
  misc_feature (53)..(54): n is a, c, g, or t
tttttttaagcagtggtatcaacgcagagtacnngagatcagnnggagaatcnntttttttttttttttttttttttttttttt

SEQ ID NO: 8250 - DNA, 84 bp, Artificial
  Barcode component
  misc_feature (33)..(34): n is a, c, g, or t
  misc_feature (43)..(44): n is a, c, g, or t
  misc_feature (53)..(54): n is a, c, g, or t
tttttttaagcagtggtatcaacgcagagtacnngagatcagnngccaagaanntttttttttttttttttttttttttttttt

SEQ ID NO: 8251 - DNA, 84 bp, Artificial
  Barcode component
  misc_feature (33)..(34): n is a, c, g, or t
  misc_feature (43)..(44): n is a, c, g, or t
  misc_feature (53)..(54): n is a, c, g, or t
tttttttaagcagtggtatcaacgcagagtacnngagatcagnnaaggcaagnntttttttttttttttttttttttttttttt

SEQ ID NO: 8252 - DNA, 84 bp, Artificial
  Barcode component
  misc_feature (33)..(34): n is a, c, g, or t
  misc_feature (43)..(44): n is a, c, g, or t
  misc_feature (53)..(54): n is a, c, g, or t
tttttttaagcagtggtatcaacgcagagtacnngagatcagnnaatgtcgcnntttttttttttttttttttttttttttttt

SEQ ID NO: 8253 - DNA, 84 bp, Artificial
  Barcode component
  misc_feature (33)..(34): n is a, c, g, or t
  misc_feature (43)..(44): n is a, c, g, or t
  misc_feature (53)..(54): n is a, c, g, or t
tttttttaagcagtggtatcaacgcagagtacnngagatcagnnatggaaccnntttttttttttttttttttttttttttttt

SEQ ID NO: 8254 - DNA, 84 bp, Artificial
  Barcode component
  misc_feature (33)..(34): n is a, c, g, or t
  misc_feature (43)..(44): n is a, c, g, or t
  misc_feature (53)..(54): n is a, c, g, or t
tttttttaagcagtggtatcaacgcagagtacnngagatcagnnagaggcatnntttttttttttttttttttttttttttttt

SEQ ID NO: 8255 - DNA, 84 bp, Artificial
  Barcode component
  misc_feature (33)..(34): n is a, c, g, or t
  misc_feature (43)..(44): n is a, c, g, or t
  misc_feature (53)..(54): n is a, c, g, or t
tttttttaagcagtggtatcaacgcagagtacnngagatcagnntgcatagcnntttttttttttttttttttttttttttttt

SEQ ID NO: 8256 - DNA, 84 bp, Artificial
  Barcode component
  misc_feature (33)..(34): n is a, c, g, or t
  misc_feature (43)..(44): n is a, c, g, or t
  misc_feature (53)..(54): n is a, c, g, or t
tttttttaagcagtggtatcaacgcagagtacnngagatcagnnctaacgganntttttttttttttttttttttttttttttt

SEQ ID NO: 8257 - DNA, 84 bp, Artificial
  Barcode component
  misc_feature (33)..(34): n is a, c, g, or t
  misc_feature (43)..(44): n is a, c, g, or t
  misc_feature (53)..(54): n is a, c, g, or t
tttttttaagcagtggtatcaacgcagagtacnngagatcagnntatcgaggnntttttttttttttttttttttttttttttt

SEQ ID NO: 8258 - DNA, 84 bp, Artificial
  Barcode component
  misc_feature (33)..(34): n is a, c, g, or t
  misc_feature (43)..(44): n is a, c, g, or t
  misc_feature (53)..(54): n is a, c, g, or t
tttttttaagcagtggtatcaacgcagagtacnngagatcagnncatagcctnntttttttttttttttttttttttttttttt

SEQ ID NO: 8259 - DNA, 84 bp, Artificial
  Barcode component
  misc_feature (33)..(34): n is a, c, g, or t
  misc_feature (43)..(44): n is a, c, g, or t
  misc_feature (53)..(54): n is a, c, g, or t
tttttttaagcagtggtatcaacgcagagtacnngagatcagnnatcgagacnntttttttttttttttttttttttttttttt

SEQ ID NO: 8260 - DNA, 84 bp, Artificial
  Barcode component
  misc_feature (33)..(34): n is a, c, g, or t
  misc_feature (43)..(44): n is a, c, g, or t
  misc_feature (53)..(54): n is a, c, g, or t
tttttttaagcagtggtatcaacgcagagtacnngagatcagnnggaagagtnntttttttttttttttttttttttttttttt

SEQ ID NO: 8261 - DNA, 84 bp, Artificial
  Barcode component
  misc_feature (33)..(34): n is a, c, g, or t
  misc_feature (43)..(44): n is a, c, g, or t
  misc_feature (53)..(54): n is a, c, g, or t
tttttttaagcagtggtatcaacgcagagtacnngagatcagnnccaagtagnntttttttttttttttttttttttttttttt

SEQ ID NO: 8262 - DNA, 84 bp, Artificial
  Barcode component
  misc_feature (33)..(34): n is a, c, g, or t
  misc_feature (43)..(44): n is a, c, g, or t
  misc_feature (53)..(54): n is a, c, g, or t
tttttttaagcagtggtatcaacgcagagtacnngagatcagnnctgaacagnntttttttttttttttttttttttttttttt

SEQ ID NO: 8263 - DNA, 84 bp, Artificial
  Barcode component
  misc_feature (33)..(34): n is a, c, g, or t
  misc_feature (43)..(44): n is a, c, g, or t
  misc_feature (53)..(54): n is a, c, g, or t
tttttttaagcagtggtatcaacgcagagtacnngagatcagnngtaggttcnntttttttttttttttttttttttttttttt

SEQ ID NO: 8264 - DNA, 84 bp, Artificial
  Barcode component
  misc_feature (33)..(34): n is a, c, g, or t
  misc_feature (43)..(44): n is a, c, g, or t
  misc_feature (53)..(54): n is a, c, g, or t
tttttttaagcagtggtatcaacgcagagtacnngagatcagnngtatggacnntttttttttttttttttttttttttttttt

SEQ ID NO: 8265 - DNA, 84 bp, Artificial
  Barcode component
  misc_feature (33)..(34): n is a, c, g, or t
  misc_feature (43)..(44): n is a, c, g, or t
  misc_feature (53)..(54): n is a, c, g, or t
tttttttaagcagtggtatcaacgcagagtacnngagatcagnntcgcaacanntttttttttttttttttttttttttttttt

SEQ ID NO: 8266 - DNA, 84 bp, Artificial
  Barcode component
  misc_feature (33)..(34): n is a, c, g, or t
  misc_feature (43)..(44): n is a, c, g, or t
  misc_feature (53)..(54): n is a, c, g, or t
tttttttaagcagtggtatcaacgcagagtacnngagatcagnnccgctaatnntttttttttttttttttttttttttttttt

SEQ ID NO: 8267 - DNA, 84 bp, Artificial
  Barcode component
  misc_feature (33)..(34): n is a, c, g, or t
  misc_feature (43)..(44): n is a, c, g, or t
  misc_feature (53)..(54): n is a, c, g, or t
tttttttaagcagtggtatcaacgcagagtacnngagatcagnngattcgcanntttttttttttttttttttttttttttttt

SEQ ID NO: 8268 - DNA, 84 bp, Artificial
  Barcode component
  misc_feature (33)..(34): n is a, c, g, or t
  misc_feature (43)..(44): n is a, c, g, or t
  misc_feature (53)..(54): n is a, c, g, or t
tttttttaagcagtggtatcaacgcagagtacnngagatcagnncgatggaanntttttttttttttttttttttttttttttt

SEQ ID NO: 8269 - DNA, 84 bp, Artificial
  Barcode component
  misc_feature (33)..(34): n is a, c, g, or t
  misc_feature (43)..(44): n is a, c, g, or t
  misc_feature (53)..(54): n is a, c, g, or t
tttttttaagcagtggtatcaacgcagagtacnngagatcagnnagcaagganntttttttttttttttttttttttttttttt

SEQ ID NO: 8270 - DNA, 84 bp, Artificial
  Barcode component
  misc_feature (33)..(34): n is a, c, g, or t
  misc_feature (43)..(44): n is a, c, g, or t
  misc_feature (53)..(54): n is a, c, g, or t
tttttttaagcagtggtatcaacgcagagtacnngagatcagnncgtagcaanntttttttttttttttttttttttttttttt

SEQ ID NO: 8271 - DNA, 84 bp, Artificial
  Barcode component
  misc_feature (33)..(34): n is a, c, g, or t
  misc_feature (43)..(44): n is a, c, g, or t
  misc_feature (53)..(54): n is a, c, g, or t
tttttttaagcagtggtatcaacgcagagtacnngagatcagnntggcagtanntttttttttttttttttttttttttttttt

SEQ ID NO: 8272 - DNA, 84 bp, Artificial
  Barcode component
  misc_feature (33)..(34): n is a, c, g, or t
  misc_feature (43)..(44): n is a, c, g, or t
  misc_feature (53)..(54): n is a, c, g, or t
tttttttaagcagtggtatcaacgcagagtacnngagatcagnncggtagttnntttttttttttttttttttttttttttttt

SEQ ID NO: 8273 - DNA, 84 bp, Artificial
  Barcode component
  misc_feature (33)..(34): n is a, c, g, or t
  misc_feature (43)..(44): n is a, c, g, or t
  misc_feature (53)..(54): n is a, c, g, or t
tttttttaagcagtggtatcaacgcagagtacnngagatcagnntgacttcgnntttttttttttttttttttttttttttttt

SEQ ID NO: 8274 - DNA, 84 bp, Artificial
  Barcode component
  misc_feature (33)..(34): n is a, c, g, or t
  misc_feature (43)..(44): n is a, c, g, or t
  misc_feature (53)..(54): n is a, c, g, or t
tttttttaagcagtggtatcaacgcagagtacnngagatcagnngagtgcaanntttttttttttttttttttttttttttttt

SEQ ID NO: 8275 - DNA, 84 bp, Artificial
  Barcode component
  misc_feature (33)..(34): n is a, c, g, or t
  misc_feature (43)..(44): n is a, c, g, or t
  misc_feature (53)..(54): n is a, c, g, or t
tttttttaagcagtggtatcaacgcagagtacnngagatcagnnacggtaacnntttttttttttttttttttttttttttttt

SEQ ID NO: 8276 - DNA, 84 bp, Artificial
  Barcode component
  misc_feature (33)..(34): n is a, c, g, or t
  misc_feature (43)..(44): n is a, c, g, or t
  misc_feature (53)..(54): n is a, c, g, or t
tttttttaagcagtggtatcaacgcagagtacnngagatcagnnaagtggtgnntttttttttttttttttttttttttttttt

SEQ ID NO: 8277 - DNA, 84 bp, Artificial
  Barcode component
  misc_feature (33)..(34): n is a, c, g, or t
  misc_feature (43)..(44): n is a, c, g, or t
  misc_feature (53)..(54): n is a, c, g, or t
tttttttaagcagtggtatcaacgcagagtacnngagatcagnnggagacaanntttttttttttttttttttttttttttttt

SEQ ID NO: 8278 - DNA, 84 bp, Artificial
  Barcode component
  misc_feature (33)..(34): n is a, c, g, or t
  misc_feature (43)..(44): n is a, c, g, or t
  misc_feature (53)..(54): n is a, c, g, or t
tttttttaagcagtggtatcaacgcagagtacnngagatcagnntcaaggacnntttttttttttttttttttttttttttttt

SEQ ID NO: 8279 - DNA, 84 bp, Artificial
  Barcode component
  misc_feature (33)..(34): n is a, c, g, or t
  misc_feature (43)..(44): n is a, c, g, or t
  misc_feature (53)..(54): n is a, c, g, or t
tttttttaagcagtggtatcaacgcagagtacnngagatcagnnaagagagcnntttttttttttttttttttttttttttttt

SEQ ID NO: 8280 - DNA, 84 bp, Artificial
  Barcode component
  misc_feature (33)..(34): n is a, c, g, or t
  misc_feature (43)..(44): n is a, c, g, or t
  misc_feature (53)..(54): n is a, c, g, or t
tttttttaagcagtggtatcaacgcagagtacnngagatcagnncgagagatnntttttttttttttttttttttttttttttt

SEQ ID NO: 8281 - DNA, 84 bp, Artificial
  Barcode component
  misc_feature (33)..(34): n is a, c, g, or t
  misc_feature (43)..(44): n is a, c, g, or t
  misc_feature (53)..(54): n is a, c, g, or t
tttttttaagcagtggtatcaacgcagagtacnngagatcagnnacagatggnntttttttttttttttttttttttttttttt

SEQ ID NO: 8282 - DNA, 84 bp, Artificial
  Barcode component
  misc_feature (33)..(34): n is a, c, g, or t
  misc_feature (43)..(44): n is a, c, g, or t
  misc_feature (53)..(54): n is a, c, g, or t
tttttttaagcagtggtatcaacgcagagtacnngagatcagnnaggagtcanntttttttttttttttttttttttttttttt

SEQ ID NO: 8283 - DNA, 84 bp, Artificial
  Barcode component
  misc_feature (33)..(34): n is a, c, g, or t
  misc_feature (43)..(44): n is a, c, g, or t
  misc_feature (53)..(54): n is a, c, g, or t
tttttttaagcagtggtatcaacgcagagtacnngagatcagnncgtgttacnntttttttttttttttttttttttttttttt

SEQ ID NO: 8284 - DNA, 84 bp, Artificial
  Barcode component
  misc_feature (33)..(34): n is a, c, g, or t
  misc_feature (43)..(44): n is a, c, g, or t
  misc_feature (53)..(54): n is a, c, g, or t
tttttttaagcagtggtatcaacgcagagtacnngagatcagnntagtgtgcnntttttttttttttttttttttttttttttt

SEQ ID NO: 8285 - DNA, 84 bp, Artificial
  Barcode component
  misc_feature (33)..(34): n is a, c, g, or t
  misc_feature (43)..(44): n is a, c, g, or t
  misc_feature (53)..(54): n is a, c, g, or t
tttttttaagcagtggtatcaacgcagagtacnngagatcagnnctcatgacnntttttttttttttttttttttttttttttt

SEQ ID NO: 8286 - DNA, 84 bp, Artificial
  Barcode component
  misc_feature (33)..(34): n is a, c, g, or t
  misc_feature (43)..(44): n is a, c, g, or t
  misc_feature (53)..(54): n is a, c, g, or t
tttttttaagcagtggtatcaacgcagagtacnngagatcagnngtatccagnntttttttttttttttttttttttttttttt

SEQ ID NO: 8287 - DNA, 84 bp, Artificial
  Barcode component
  misc_feature (33)..(34): n is a, c, g, or t
  misc_feature (43)..(44): n is a, c, g, or t
  misc_feature (53)..(54): n is a, c, g, or t
tttttttaagcagtggtatcaacgcagagtacnngagatcagnnacgcctatnntttttttttttttttttttttttttttttt

SEQ ID NO: 8288 - DNA, 84 bp, Artificial
  Barcode component
  misc_feature (33)..(34): n is a, c, g, or t
  misc_feature (43)..(44): n is a, c, g, or t
  misc_feature (53)..(54): n is a, c, g, or t
tttttttaagcagtggtatcaacgcagagtacnngagatcagnnaacgacctnntttttttttttttttttttttttttttttt

SEQ ID NO: 8289 - DNA, 84 bp, Artificial
  Barcode component
  misc_feature (33)..(34): n is a, c, g, or t
  misc_feature (43)..(44): n is a, c, g, or t
  misc_feature (53)..(54): n is a, c, g, or t
tttttttaagcagtggtatcaacgcagagtacnngagatcagnnatcaggctnntttttttttttttttttttttttttttttt

SEQ ID NO: 8290 - DNA, 84 bp, Artificial
  Barcode component
  misc_feature (33)..(34): n is a, c, g, or t
  misc_feature (43)..(44): n is a, c, g, or t
  misc_feature (53)..(54): n is a, c, g, or t
tttttttaagcagtggtatcaacgcagagtacnngagatcagnncaagttcgnntttttttttttttttttttttttttttttt

SEQ ID NO: 8291 - DNA, 84 bp, Artificial
  Barcode component
  misc_feature (33)..(34): n is a, c, g, or t
  misc_feature (43)..(44): n is a, c, g, or t
  misc_feature (53)..(54): n is a, c, g, or t
tttttttaagcagtggtatcaacgcagagtacnngagatcagnntagccaganntttttttttttttttttttttttttttttt

SEQ ID NO: 8292 - DNA, 84 bp, Artificial
  Barcode component
  misc_feature (33)..(34): n is a, c, g, or t
  misc_feature (43)..(44): n is a, c, g, or t
  misc_feature (53)..(54): n is a, c, g, or t
tttttttaagcagtggtatcaacgcagagtacnngagatcagnncaatcacgnntttttttttttttttttttttttttttttt

SEQ ID NO: 8293 - DNA, 84 bp, Artificial
  Barcode component
  misc_feature (33)..(34): n is a, c, g, or t
  misc_feature (43)..(44): n is a, c, g, or t
  misc_feature (53)..(54): n is a, c, g, or t
tttttttaagcagtggtatcaacgcagagtacnngagatcagnngcaacaagnntttttttttttttttttttttttttttttt

SEQ ID NO: 8294 - DNA, 84 bp, Artificial
  Barcode component
  misc_feature (33)..(34): n is a, c, g, or t
  misc_feature (43)..(44): n is a, c, g, or t
  misc_feature (53)..(54): n is a, c, g, or t
tttttttaagcagtggtatcaacgcagagtacnngagatcagnncacgacaanntttttttttttttttttttttttttttttt

SEQ ID NO: 8295 - DNA, 84 bp, Artificial
  Barcode component
  misc_feature (33)..(34): n is a, c, g, or t
  misc_feature (43)..(44): n is a, c, g, or t
  misc_feature (53)..(54): n is a, c, g, or t
tttttttaagcagtggtatcaacgcagagtacnngagatcagnntacggaganntttttttttttttttttttttttttttttt

SEQ ID NO: 8296 - DNA, 84 bp, Artificial
  Barcode component
  misc_feature (33)..(34): n is a, c, g, or t
  misc_feature (43)..(44): n is a, c, g, or t
  misc_feature (53)..(54): n is a, c, g, or t
tttttttaagcagtggtatcaacgcagagtacnngagatcagnncgacaaganntttttttttttttttttttttttttttttt

SEQ ID NO: 8297 - DNA, 84 bp, Artificial
  Barcode component
  misc_feature (33)..(34): n is a, c, g, or t
  misc_feature (43)..(44): n is a, c, g, or t
  misc_feature (53)..(54): n is a, c, g, or t
tttttttaagcagtggtatcaacgcagagtacnngagatcagnncgaagtganntttttttttttttttttttttttttttttt

SEQ ID NO: 8298 - DNA, 84 bp, Artificial
  Barcode component
  misc_feature (33)..(34): n is a, c, g, or t
  misc_feature (43)..(44): n is a, c, g, or t
  misc_feature (53)..(54): n is a, c, g, or t
tttttttaagcagtggtatcaacgcagagtacnngagatcagnnagctggtanntttttttttttttttttttttttttttttt

SEQ ID NO: 8299 - DNA, 84 bp, Artificial
  Barcode component
  misc_feature (33)..(34): n is a, c, g, or t
  misc_feature (43)..(44): n is a, c, g, or t
  misc_feature (53)..(54): n is a, c, g, or t
tttttttaagcagtggtatcaacgcagagtacnngagatcagnnaactaggcnntttttttttttttttttttttttttttttt

SEQ ID NO: 8300 - DNA, 84 bp, Artificial
  Barcode component
  misc_feature (33)..(34): n is a, c, g, or t
  misc_feature (43)..(44): n is a, c, g, or t
  misc_feature (53)..(54): n is a, c, g, or t
tttttttaagcagtggtatcaacgcagagtacnngagatcagnncagcaagtnntttttttttttttttttttttttttttttt

SEQ ID NO: 8301 - DNA, 84 bp, Artificial
  Barcode component
  misc_feature (33)..(34): n is a, c, g, or t
  misc_feature (43)..(44): n is a, c, g, or t
  misc_feature (53)..(54): n is a, c, g, or t
tttttttaagcagtggtatcaacgcagagtacnngagatcagnnacgaggtanntttttttttttttttttttttttttttttt

SEQ ID NO: 8302 - DNA, 84 bp, Artificial
  Barcode component
  misc_feature (33)..(34): n is a, c, g, or t
  misc_feature (43)..(44): n is a, c, g, or t
  misc_feature (53)..(54): n is a, c, g, or t
tttttttaagcagtggtatcaacgcagagtacnngagatcagnncatcttccnntttttttttttttttttttttttttttttt

SEQ ID NO: 8303 - DNA, 84 bp, Artificial
  Barcode component
  misc_feature (33)..(34): n is a, c, g, or t
  misc_feature (43)..(44): n is a, c, g, or t
  misc_feature (53)..(54): n is a, c, g, or t
tttttttaagcagtggtatcaacgcagagtacnngagatcagnncctgaatcnntttttttttttttttttttttttttttttt

SEQ ID NO: 8304 - DNA, 84 bp, Artificial
  Barcode component
  misc_feature (33)..(34): n is a, c, g, or t
  misc_feature (43)..(44): n is a, c, g, or t
  misc_feature (53)..(54): n is a, c, g, or t
tttttttaagcagtggtatcaacgcagagtacnngagatcagnntgcagactnntttttttttttttttttttttttttttttt

SEQ ID NO: 8305 - DNA, 84 bp, Artificial
  Barcode component
  misc_feature (33)..(34): n is a, c, g, or t
  misc_feature (43)..(44): n is a, c, g, or t
  misc_feature (53)..(54): n is a, c, g, or t
tttttttaagcagtggtatcaacgcagagtacnngagatcagnnagatgtggnntttttttttttttttttttttttttttttt

SEQ ID NO: 8306 - DNA, 84 bp, Artificial
  Barcode component
  misc_feature (33)..(34): n is a, c, g, or t
  misc_feature (43)..(44): n is a, c, g, or t
  misc_feature (53)..(54): n is a, c, g, or t
tttttttaagcagtggtatcaacgcagagtacnngagatcagnnagttcgacnntttttttttttttttttttttttttttttt

SEQ ID NO: 8307 - DNA, 84 bp, Artificial
  Barcode component
  misc_feature (33)..(34): n is a, c, g, or t
  misc_feature (43)..(44): n is a, c, g, or t
  misc_feature (53)..(54): n is a, c, g, or t
tttttttaagcagtggtatcaacgcagagtacnngagatcagnnacaacctcnntttttttttttttttttttttttttttttt

SEQ ID NO: 8308 - DNA, 84 bp, Artificial
  Barcode component
  misc_feature (33)..(34): n is a, c, g, or t
  misc_feature (43)..(44): n is a, c, g, or t
  misc_feature (53)..(54): n is a, c, g, or t
tttttttaagcagtggtatcaacgcagagtacnngagatcagnncatggtagnntttttttttttttttttttttttttttttt

SEQ ID NO: 8309 - DNA, 84 bp, Artificial
  Barcode component
  misc_feature (33)..(34): n is a, c, g, or t
  misc_feature (43)..(44): n is a, c, g, or t
  misc_feature (53)..(54): n is a, c, g, or t
tttttttaagcagtggtatcaacgcagagtacnngagatcagnncgtatctcnntttttttttttttttttttttttttttttt

SEQ ID NO: 8310 - DNA, 84 bp, Artificial
  Barcode component
  misc_feature (33)..(34): n is a, c, g, or t
  misc_feature (43)..(44): n is a, c, g, or t
  misc_feature (53)..(54): n is a, c, g, or t
tttttttaagcagtggtatcaacgcagagtacnngagatcagnncctagttcnntttttttttttttttttttttttttttttt

SEQ ID NO: 8311 - DNA, 84 bp, Artificial
  Barcode component
  misc_feature (33)..(34): n is a, c, g, or t
  misc_feature (43)..(44): n is a, c, g, or t
  misc_feature (53)..(54): n is a, c, g, or t
tttttttaagcagtggtatcaacgcagagtacnngagatcagnncaagagtcnntttttttttttttttttttttttttttttt

SEQ ID NO: 8312 - DNA, 84 bp, Artificial
  Barcode component
  misc_feature (33)..(34): n is a, c, g, or t
  misc_feature (43)..(44): n is a, c, g, or t
  misc_feature (53)..(54): n is a, c, g, or t
tttttttaagcagtggtatcaacgcagagtacnntgaaggcannaatcggcanntttttttttttttttttttttttttttttt

SEQ ID NO: 8313 - DNA, 84 bp, Artificial
  Barcode component
  misc_feature (33)..(34): n is a, c, g, or t
  misc_feature (43)..(44): n is a, c, g, or t
  misc_feature (53)..(54): n is a, c, g, or t
tttttttaagcagtggtatcaacgcagagtacnntgaaggcanntacggcatnntttttttttttttttttttttttttttttt

SEQ ID NO: 8314 - DNA, 84 bp, Artificial
  Barcode component
  misc_feature (33)..(34): n is a, c, g, or t
  misc_feature (43)..(44): n is a, c, g, or t
  misc_feature (53)..(54): n is a, c, g, or t
tttttttaagcagtggtatcaacgcagagtacnntgaaggcannttggatcgnntttttttttttttttttttttttttttttt

SEQ ID NO: 8315 - DNA, 84 bp, Artificial
  Barcode component
  misc_feature (33)..(34): n is a, c, g, or t
  misc_feature (43)..(44): n is a, c, g, or t
  misc_feature (53)..(54): n is a, c, g, or t
tttttttaagcagtggtatcaacgcagagtacnntgaaggcanntggaacganntttttttttttttttttttttttttttttt

SEQ ID NO: 8316 - DNA, 84 bp, Artificial
  Barcode component
  misc_feature (33)..(34): n is a, c, g, or t
  misc_feature (43)..(44): n is a, c, g, or t
  misc_feature (53)..(54): n is a, c, g, or t
tttttttaagcagtggtatcaacgcagagtacnntgaaggcannggcaatcanntttttttttttttttttttttttttttttt

SEQ ID NO: 8317 - DNA, 84 bp, Artificial
  Barcode component
  misc_feature (33)..(34): n is a, c, g, or t
  misc_feature (43)..(44): n is a, c, g, or t
  misc_feature (53)..(54): n is a, c, g, or t
tttttttaagcagtggtatcaacgcagagtacnntgaaggcanngaatccganntttttttttttttttttttttttttttttt

SEQ ID NO: 8318 - DNA, 84 bp, Artificial
  Barcode component
  misc_feature (33)..(34): n is a, c, g, or t
  misc_feature (43)..(44): n is a, c, g, or t
  misc_feature (53)..(54): n is a, c, g, or t
tttttttaagcagtggtatcaacgcagagtacnntgaaggcannttacggtgnntttttttttttttttttttttttttttttt

SEQ ID NO: 8319 - DNA, 84 bp, Artificial
  Barcode component
  misc_feature (33)..(34): n is a, c, g, or t
  misc_feature (43)..(44): n is a, c, g, or t
  misc_feature (53)..(54): n is a, c, g, or t
tttttttaagcagtggtatcaacgcagagtacnntgaaggcanncatatcggnntttttttttttttttttttttttttttttt

SEQ ID NO: 8320 - DNA, 84 bp, Artificial
  Barcode component
  misc_feature (33)..(34): n is a, c, g, or t
  misc_feature (43)..(44): n is a, c, g, or t
  misc_feature (53)..(54): n is a, c, g, or t
tttttttaagcagtggtatcaacgcagagtacnntgaaggcanncttcggtanntttttttttttttttttttttttttttttt

SEQ ID NO: 8321 - DNA, 84 bp, Artificial
  Barcode component
  misc_feature (33)..(34): n is a, c, g, or t
  misc_feature (43)..(44): n is a, c, g, or t
  misc_feature (53)..(54): n is a, c, g, or t
tttttttaagcagtggtatcaacgcagagtacnntgaaggcanntcctaacgnntttttttttttttttttttttttttttttt

SEQ ID NO: 8322 - DNA, 84 bp, Artificial
  Barcode component
  misc_feature (33)..(34): n is a, c, g, or t
  misc_feature (43)..(44): n is a, c, g, or t
  misc_feature (53)..(54): n is a, c, g, or t
tttttttaagcagtggtatcaacgcagagtacnntgaaggcanngtaagccanntttttttttttttttttttttttttttttt

SEQ ID NO: 8323 - DNA, 84 bp, Artificial
  Barcode component
  misc_feature (33)..(34): n is a, c, g, or t
  misc_feature (43)..(44): n is a, c, g, or t
  misc_feature (53)..(54): n is a, c, g, or t
tttttttaagcagtggtatcaacgcagagtacnntgaaggcanntaaggtggnntttttttttttttttttttttttttttttt

SEQ ID NO: 8324 - DNA, 84 bp, Artificial
  Barcode component
  misc_feature (33)..(34): n is a, c, g, or t
  misc_feature (43)..(44): n is a, c, g, or t
  misc_feature (53)..(54): n is a, c, g, or t
tttttttaagcagtggtatcaacgcagagtacnntgaaggcannggtaagctnntttttttttttttttttttttttttttttt

SEQ ID NO: 8325 - DNA, 84 bp, Artificial
  Barcode component
  misc_feature (33)..(34): n is a, c, g, or t
  misc_feature (43)..(44): n is a, c, g, or t
  misc_feature (53)..(54): n is a, c, g, or t
tttttttaagcagtggtatcaacgcagagtacnntgaaggcanntgtgtcganntttttttttttttttttttttttttttttt

SEQ ID NO: 8326 - DNA, 84 bp, Artificial
  Barcode component
  misc_feature (33)..(34): n is a, c, g, or t
  misc_feature (43)..(44): n is a, c, g, or t
  misc_feature (53)..(54): n is a, c, g, or t
tttttttaagcagtggtatcaacgcagagtacnntgaaggcanngagcatganntttttttttttttttttttttttttttttt

SEQ ID NO: 8327 - DNA, 84 bp, Artificial
  Barcode component
  misc_feature (33)..(34): n is a, c, g, or t
  misc_feature (43)..(44): n is a, c, g, or t
  misc_feature (53)..(54): n is a, c, g, or t
tttttttaagcagtggtatcaacgcagagtacnntgaaggcanntcgaagtcnntttttttttttttttttttttttttttttt

SEQ ID NO: 8328 - DNA, 84 bp, Artificial
  Barcode component
  misc_feature (33)..(34): n is a, c, g, or t
  misc_feature (43)..(44): n is a, c, g, or t
  misc_feature (53)..(54): n is a, c, g, or t
tttttttaagcagtggtatcaacgcagagtacnntgaaggcannggtgaacanntttttttttttttttttttttttttttttt

SEQ ID NO: 8329 - DNA, 84 bp, Artificial
  Barcode component
  misc_feature (33)..(34): n is a, c, g, or t
  misc_feature (43)..(44): n is a, c, g, or t
  misc_feature (53)..(54): n is a, c, g, or t
tttttttaagcagtggtatcaacgcagagtacnntgaaggcannacatgcacnntttttttttttttttttttttttttttttt

SEQ ID NO: 8330 - DNA, 84 bp, Artificial
  Barcode component
  misc_feature (33)..(34): n is a, c, g, or t
  misc_feature (43)..(44): n is a, c, g, or t
  misc_feature (53)..(54): n is a, c, g, or t
tttttttaagcagtggtatcaacgcagagtacnntgaaggcannccaacagtnntttttttttttttttttttttttttttttt

SEQ ID NO: 8331 - DNA, 84 bp, Artificial
  Barcode component
  misc_feature (33)..(34): n is a, c, g, or t
  misc_feature (43)..(44): n is a, c, g, or t
  misc_feature (53)..(54): n is a, c, g, or t
tttttttaagcagtggtatcaacgcagagtacnntgaaggcannagaacagcnntttttttttttttttttttttttttttttt

SEQ ID NO: 8332 - DNA, 84 bp, Artificial
  Barcode component
  misc_feature (33)..(34): n is a, c, g, or t
  misc_feature (43)..(44): n is a, c, g, or t
  misc_feature (53)..(54): n is a, c, g, or t
tttttttaagcagtggtatcaacgcagagtacnntgaaggcanngaacacgtnntttttttttttttttttttttttttttttt

SEQ ID NO: 8333 - DNA, 84 bp, Artificial
  Barcode component
  misc_feature (33)..(34): n is a, c, g, or t
  misc_feature (43)..(44): n is a, c, g, or t
  misc_feature (53)..(54): n is a, c, g, or t
tttttttaagcagtggtatcaacgcagagtacnntgaaggcannggtcttcanntttttttttttttttttttttttttttttt

SEQ ID NO: 8334 - DNA, 84 bp, Artificial
  Barcode component
  misc_feature (33)..(34): n is a, c, g, or t
  misc_feature (43)..(44): n is a, c, g, or t
  misc_feature (53)..(54): n is a, c, g, or t
tttttttaagcagtggtatcaacgcagagtacnntgaaggcannaggttcagnntttttttttttttttttttttttttttttt

SEQ ID NO: 8335 - DNA, 84 bp, Artificial
  Barcode component
  misc_feature (33)..(34): n is a, c, g, or t
  misc_feature (43)..(44): n is a, c, g, or t
  misc_feature (53)..(54): n is a, c, g, or t
tttttttaagcagtggtatcaacgcagagtacnntgaaggcannctagagcanntttttttttttttttttttttttttttttt

SEQ ID NO: 8336 - DNA, 84 bp, Artificial
  Barcode component
  misc_feature (33)..(34): n is a, c, g, or t
  misc_feature (43)..(44): n is a, c, g, or t
  misc_feature (53)..(54): n is a, c, g, or t
tttttttaagcagtggtatcaacgcagagtacnntgaaggcanncttctagcnntttttttttttttttttttttttttttttt

SEQ ID NO: 8337 - DNA, 84 bp, Artificial
  Barcode component
  misc_feature (33)..(34): n is a, c, g, or t
  misc_feature (43)..(44): n is a, c, g, or t
  misc_feature (53)..(54): n is a, c, g, or t
tttttttaagcagtggtatcaacgcagagtacnntgaaggcanngagtaacgnntttttttttttttttttttttttttttttt

SEQ ID NO: 8338 - DNA, 84 bp, Artificial
  Barcode component
  misc_feature (33)..(34): n is a, c, g, or t
  misc_feature (43)..(44): n is a, c, g, or t
  misc_feature (53)..(54): n is a, c, g, or t
tttttttaagcagtggtatcaacgcagagtacnntgaaggcannctaagaggnntttttttttttttttttttttttttttttt

SEQ ID NO: 8339 - DNA, 84 bp, Artificial
  Barcode component
  misc_feature (33)..(34): n is a, c, g, or t
  misc_feature (43)..(44): n is a, c, g, or t
  misc_feature (53)..(54): n is a, c, g, or t
tttttttaagcagtggtatcaacgcagagtacnntgaaggcannacgtgtagnntttttttttttttttttttttttttttttt

SEQ ID NO: 8340 - DNA, 84 bp, Artificial
  Barcode component
  misc_feature (33)..(34): n is a, c, g, or t
  misc_feature (43)..(44): n is a, c, g, or t
  misc_feature (53)..(54): n is a, c, g, or t
tttttttaagcagtggtatcaacgcagagtacnntgaaggcannactacaggnntttttttttttttttttttttttttttttt

SEQ ID NO: 8341 - DNA, 84 bp, Artificial
  Barcode component
  misc_feature (33)..(34): n is a, c, g, or t
  misc_feature (43)..(44): n is a, c, g, or t
  misc_feature (53)..(54): n is a, c, g, or t
tttttttaagcagtggtatcaacgcagagtacnntgaaggcanntacaggtcnntttttttttttttttttttttttttttttt

SEQ ID NO: 8342 - DNA, 84 bp, Artificial
  Barcode component
  misc_feature (33)..(34): n is a, c, g, or t
  misc_feature (43)..(44): n is a, c, g, or t
  misc_feature (53)..(54): n is a, c, g, or t
tttttttaagcagtggtatcaacgcagagtacnntgaaggcannctcacatgnntttttttttttttttttttttttttttttt

SEQ ID NO: 8343 - DNA, 84 bp, Artificial
  Barcode component
  misc_feature (33)..(34): n is a, c, g, or t
  misc_feature (43)..(44): n is a, c, g, or t
  misc_feature (53)..(54): n is a, c, g, or t
tttttttaagcagtggtatcaacgcagagtacnntgaaggcannactaggagnntttttttttttttttttttttttttttttt

SEQ ID NO: 8344 - DNA, 84 bp, Artificial
  Barcode component
  misc_feature (33)..(34): n is a, c, g, or t
  misc_feature (43)..(44): n is a, c, g, or t
  misc_feature (53)..(54): n is a, c, g, or t
tttttttaagcagtggtatcaacgcagagtacnntgaaggcannccatagganntttttttttttttttttttttttttttttt

SEQ ID NO: 8345 - DNA, 84 bp, Artificial
  Barcode component
  misc_feature (33)..(34): n is a, c, g, or t
  misc_feature (43)..(44): n is a, c, g, or t
  misc_feature (53)..(54): n is a, c, g, or t
tttttttaagcagtggtatcaacgcagagtacnntgaaggcannggagaatcnntttttttttttttttttttttttttttttt

SEQ ID NO: 8346 - DNA, 84 bp, Artificial
  Barcode component
  misc_feature (33)..(34): n is a, c, g, or t
  misc_feature (43)..(44): n is a, c, g, or t
  misc_feature (53)..(54): n is a, c, g, or t
tttttttaagcagtggtatcaacgcagagtacnntgaaggcanngccaagaanntttttttttttttttttttttttttttttt

SEQ ID NO: 8347 - DNA, 84 bp, Artificial
  Barcode component
  misc_feature (33)..(34): n is a, c, g, or t
  misc_feature (43)..(44): n is a, c, g, or t
  misc_feature (53)..(54): n is a, c, g, or t
tttttttaagcagtggtatcaacgcagagtacnntgaaggcannaaggcaagnntttttttttttttttttttttttttttttt

SEQ ID NO: 8348 - DNA, 84 bp, Artificial
  Barcode component
  misc_feature (33)..(34): n is a, c, g, or t
  misc_feature (43)..(44): n is a, c, g, or t
  misc_feature (53)..(54): n is a, c, g, or t
tttttttaagcagtggtatcaacgcagagtacnntgaaggcannaatgtcgcnntttttttttttttttttttttttttttttt

SEQ ID NO: 8349 - DNA, 84 bp, Artificial
  Barcode component
  misc_feature (33)..(34): n is a, c, g, or t
  misc_feature (43)..(44): n is a, c, g, or t
  misc_feature (53)..(54): n is a, c, g, or t
tttttttaagcagtggtatcaacgcagagtacnntgaaggcannatggaaccnntttttttttttttttttttttttttttttt

SEQ ID NO: 8350 - DNA, 84 bp, Artificial
  Barcode component
  misc_feature (33)..(34): n is a, c, g, or t
  misc_feature (43)..(44): n is a, c, g, or t
  misc_feature (53)..(54): n is a, c, g, or t
tttttttaagcagtggtatcaacgcagagtacnntgaaggcannagaggcatnntttttttttttttttttttttttttttttt

SEQ ID NO: 8351 - DNA, 84 bp, Artificial
  Barcode component
  misc_feature (33)..(34): n is a, c, g, or t
  misc_feature (43)..(44): n is a, c, g, or t
  misc_feature (53)..(54): n is a, c, g, or t
tttttttaagcagtggtatcaacgcagagtacnntgaaggcanntgcatagcnntttttttttttttttttttttttttttttt

SEQ ID NO: 8352 - DNA, 84 bp, Artificial
  Barcode component
  misc_feature (33)..(34): n is a, c, g, or t
  misc_feature (43)..(44): n is a, c, g, or t
  misc_feature (53)..(54): n is a, c, g, or t
tttttttaagcagtggtatcaacgcagagtacnntgaaggcannctaacgganntttttttttttttttttttttttttttttt

SEQ ID NO: 8353 - DNA, 84 bp, Artificial
  Barcode component
  misc_feature (33)..(34): n is a, c, g, or t
  misc_feature (43)..(44): n is a, c, g, or t
  misc_feature (53)..(54): n is a, c, g, or t
tttttttaagcagtggtatcaacgcagagtacnntgaaggcanntatcgaggnntttttttttttttttttttttttttttttt

SEQ ID NO: 8354 - DNA, 84 bp, Artificial
  Barcode component
  misc_feature (33)..(34): n is a, c, g, or t
  misc_feature (43)..(44): n is a, c, g, or t
  misc_feature (53)..(54): n is a, c, g, or t
tttttttaagcagtggtatcaacgcagagtacnntgaaggcanncatagcctnntttttttttttttttttttttttttttttt

SEQ ID NO: 8355 - DNA, 84 bp, Artificial
  Barcode component
  misc_feature (33)..(34): n is a, c, g, or t
  misc_feature (43)..(44): n is a, c, g, or t
  misc_feature (53)..(54): n is a, c, g, or t
tttttttaagcagtggtatcaacgcagagtacnntgaaggcannatcgagacnntttttttttttttttttttttttttttttt

SEQ ID NO: 8356 - DNA, 84 bp, Artificial
  Barcode component
  misc_feature (33)..(34): n is a, c, g, or t
  misc_feature (43)..(44): n is a, c, g, or t
  misc_feature (53)..(54): n is a, c, g, or t
tttttttaagcagtggtatcaacgcagagtacnntgaaggcannggaagagtnntttttttttttttttttttttttttttttt

SEQ ID NO: 8357 - DNA, 84 bp, Artificial
  Barcode component
  misc_feature (33)..(34): n is a, c, g, or t
  misc_feature (43)..(44): n is a, c, g, or t
  misc_feature (53)..(54): n is a, c, g, or t
tttttttaagcagtggtatcaacgcagagtacnntgaaggcannccaagtagnntttttttttttttttttttttttttttttt

SEQ ID NO: 8358 - DNA, 84 bp, Artificial
  Barcode component
  misc_feature (33)..(34): n is a, c, g, or t
  misc_feature (43)..(44): n is a, c, g, or t
  misc_feature (53)..(54): n is a, c, g, or t
tttttttaagcagtggtatcaacgcagagtacnntgaaggcannctgaacagnntttttttttttttttttttttttttttttt

SEQ ID NO: 8359 - DNA, 84 bp, Artificial
  Barcode component
  misc_feature (33)..(34): n is a, c, g, or t
  misc_feature (43)..(44): n is a, c, g, or t
  misc_feature (53)..(54): n is a, c, g, or t
tttttttaagcagtggtatcaacgcagagtacnntgaaggcanngtaggttcnntttttttttttttttttttttttttttttt

SEQ ID NO: 8360 - DNA, 84 bp, Artificial
  Barcode component
  misc_feature (33)..(34): n is a, c, g, or t
  misc_feature (43)..(44): n is a, c, g, or t
  misc_feature (53)..(54): n is a, c, g, or t
tttttttaagcagtggtatcaacgcagagtacnntgaaggcanngtatggacnntttttttttttttttttttttttttttttt

SEQ ID NO: 8361 - DNA, 84 bp, Artificial
  Barcode component
  misc_feature (33)..(34): n is a, c, g, or t
  misc_feature (43)..(44): n is a, c, g, or t
  misc_feature (53)..(54): n is a, c, g, or t
tttttttaagcagtggtatcaacgcagagtacnntgaaggcanntcgcaacanntttttttttttttttttttttttttttttt

SEQ ID NO: 8362 - DNA, 84 bp, Artificial
  Barcode component
  misc_feature (33)..(34): n is a, c, g, or t
  misc_feature (43)..(44): n is a, c, g, or t
  misc_feature (53)..(54): n is a, c, g, or t
tttttttaagcagtggtatcaacgcagagtacnntgaaggcannccgctaatnntttttttttttttttttttttttttttttt

SEQ ID NO: 8363 - DNA, 84 bp, Artificial
  Barcode component
  misc_feature (33)..(34): n is a, c, g, or t
  misc_feature (43)..(44): n is a, c, g, or t
  misc_feature (53)..(54): n is a, c, g, or t
tttttttaagcagtggtatcaacgcagagtacnntgaaggcanngattcgcanntttttttttttttttttttttttttttttt

SEQ ID NO: 8364 - DNA, 84 bp, Artificial
  Barcode component
  misc_feature (33)..(34): n is a, c, g, or t
  misc_feature (43)..(44): n is a, c, g, or t
  misc_feature (53)..(54): n is a, c, g, or t
tttttttaagcagtggtatcaacgcagagtacnntgaaggcanncgatggaanntttttttttttttttttttttttttttttt

SEQ ID NO: 8365 - DNA, 84 bp, Artificial
  Barcode component
  misc_feature (33)..(34): n is a, c, g, or t
  misc_feature (43)..(44): n is a, c, g, or t
  misc_feature (53)..(54): n is a, c, g, or t
tttttttaagcagtggtatcaacgcagagtacnntgaaggcannagcaagganntttttttttttttttttttttttttttttt

SEQ ID NO: 8366 - DNA, 84 bp, Artificial
  Barcode component
  misc_feature (33)..(34): n is a, c, g, or t
  misc_feature (43)..(44): n is a, c, g, or t
  misc_feature (53)..(54): n is a, c, g, or t
tttttttaagcagtggtatcaacgcagagtacnntgaaggcanncgtagcaanntttttttttttttttttttttttttttttt

SEQ ID NO: 8367 - DNA, 84 bp, Artificial
  Barcode component
  misc_feature (33)..(34): n is a, c, g, or t
  misc_feature (43)..(44): n is a, c, g, or t
  misc_feature (53)..(54): n is a, c, g, or t
tttttttaagcagtggtatcaacgcagagtacnntgaaggcanntggcagtanntttttttttttttttttttttttttttttt

SEQ ID NO: 8368 - DNA, 84 bp, Artificial
  Barcode component
  misc_feature (33)..(34): n is a, c, g, or t
  misc_feature (43)..(44): n is a, c, g, or t
  misc_feature (53)..(54): n is a, c, g, or t
tttttttaagcagtggtatcaacgcagagtacnntgaaggcanncggtagttnntttttttttttttttttttttttttttttt

SEQ ID NO: 8369 - DNA, 84 bp, Artificial
  Barcode component
  misc_feature (33)..(34): n is a, c, g, or t
  misc_feature (43)..(44): n is a, c, g, or t
  misc_feature (53)..(54): n is a, c, g, or t
tttttttaagcagtggtatcaacgcagagtacnntgaaggcanntgacttcgnntttttttttttttttttttttttttttttt

SEQ ID NO: 8370 - DNA, 84 bp, Artificial
  Barcode component
  misc_feature (33)..(34): n is a, c, g, or t
  misc_feature (43)..(44): n is a, c, g, or t
  misc_feature (53)..(54): n is a, c, g, or t
tttttttaagcagtggtatcaacgcagagtacnntgaaggcanngagtgcaanntttttttttttttttttttttttttttttt

SEQ ID NO: 8371 - DNA, 84 bp, Artificial
  Barcode component
  misc_feature (33)..(34): n is a, c, g, or t
  misc_feature (43)..(44): n is a, c, g, or t
  misc_feature (53)..(54): n is a, c, g, or t
tttttttaagcagtggtatcaacgcagagtacnntgaaggcannacggtaacnntttttttttttttttttttttttttttttt

SEQ ID NO: 8372 - DNA, 84 bp, Artificial
  Barcode component
  misc_feature (33)..(34): n is a, c, g, or t
  misc_feature (43)..(44): n is a, c, g, or t
  misc_feature (53)..(54): n is a, c, g, or t
tttttttaagcagtggtatcaacgcagagtacnntgaaggcannaagtggtgnntttttttttttttttttttttttttttttt

SEQ ID NO: 8373 - DNA, 84 bp, Artificial
  Barcode component
  misc_feature (33)..(34): n is a, c, g, or t
  misc_feature (43)..(44): n is a, c, g, or t
  misc_feature (53)..(54): n is a, c, g, or t
tttttttaagcagtggtatcaacgcagagtacnntgaaggcannggagacaanntttttttttttttttttttttttttttttt

SEQ ID NO: 8374 - DNA, 84 bp, Artificial
  Barcode component
  misc_feature (33)..(34): n is a, c, g, or t
  misc_feature (43)..(44): n is a, c, g, or t
  misc_feature (53)..(54): n is a, c, g, or t
tttttttaagcagtggtatcaacgcagagtacnntgaaggcanntcaaggacnntttttttttttttttttttttttttttttt

SEQ ID NO: 8375 - DNA, 84 bp, Artificial
  Barcode component
  misc_feature (33)..(34): n is a, c, g, or t
  misc_feature (43)..(44): n is a, c, g, or t
  misc_feature (53)..(54): n is a, c, g, or t
tttttttaagcagtggtatcaacgcagagtacnntgaaggcannaagagagcnntttttttttttttttttttttttttttttt

SEQ ID NO: 8376 - DNA, 84 bp, Artificial
  Barcode component
  misc_feature (33)..(34): n is a, c, g, or t
  misc_feature (43)..(44): n is a, c, g, or t
  misc_feature (53)..(54): n is a, c, g, or t
tttttttaagcagtggtatcaacgcagagtacnntgaaggcanncgagagatnntttttttttttttttttttttttttttttt

SEQ ID NO: 8377 - DNA, 84 bp, Artificial
  Barcode component
  misc_feature (33)..(34): n is a, c, g, or t
  misc_feature (43)..(44): n is a, c, g, or t
  misc_feature (53)..(54): n is a, c, g, or t
tttttttaagcagtggtatcaacgcagagtacnntgaaggcannacagatggnntttttttttttttttttttttttttttttt

SEQ ID NO: 8378 - DNA, 84 bp, Artificial
  Barcode component
  misc_feature (33)..(34): n is a, c, g, or t
  misc_feature (43)..(44): n is a, c, g, or t
  misc_feature (53)..(54): n is a, c, g, or t
tttttttaagcagtggtatcaacgcagagtacnntgaaggcannaggagtcanntttttttttttttttttttttttttttttt

SEQ ID NO: 8379 - DNA, 84 bp, Artificial
  Barcode component
  misc_feature (33)..(34): n is a, c, g, or t
  misc_feature (43)..(44): n is a, c, g, or t
  misc_feature (53)..(54): n is a, c, g, or t
tttttttaagcagtggtatcaacgcagagtacnntgaaggcanncgtgttacnntttttttttttttttttttttttttttttt

SEQ ID NO: 8380 - DNA, 84 bp, Artificial
  Barcode component
  misc_feature (33)..(34): n is a, c, g, or t
  misc_feature (43)..(44): n is a, c, g, or t
  misc_feature (53)..(54): n is a, c, g, or t
tttttttaagcagtggtatcaacgcagagtacnntgaaggcanntagtgtgcnntttttttttttttttttttttttttttttt

SEQ ID NO: 8381 - DNA, 84 bp, Artificial
  Barcode component
  misc_feature (33)..(34): n is a, c, g, or t
  misc_feature (43)..(44): n is a, c, g, or t
  misc_feature (53)..(54): n is a, c, g, or t
tttttttaagcagtggtatcaacgcagagtacnntgaaggcannctcatgacnntttttttttttttttttttttttttttttt

SEQ ID NO: 8382 - DNA, 84 bp, Artificial
  Barcode component
  misc_feature (33)..(34): n is a, c, g, or t
  misc_feature (43)..(44): n is a, c, g, or t
  misc_feature (53)..(54): n is a, c, g, or t
tttttttaagcagtggtatcaacgcagagtacnntgaaggcanngtatccagnntttttttttttttttttttttttttttttt

SEQ ID NO: 8383 - DNA, 84 bp, Artificial
  Barcode component
  misc_feature (33)..(34): n is a, c, g, or t
  misc_feature (43)..(44): n is a, c, g, or t
  misc_feature (53)..(54): n is a, c, g, or t
tttttttaagcagtggtatcaacgcagagtacnntgaaggcannacgcctatnntttttttttttttttttttttttttttttt

SEQ ID NO: 8384 - DNA, 84 bp, Artificial
  Barcode component
  misc_feature (33)..(34): n is a, c, g, or t
  misc_feature (43)..(44): n is a, c, g, or t
  misc_feature (53)..(54): n is a, c, g, or t
tttttttaagcagtggtatcaacgcagagtacnntgaaggcannaacgacctnntttttttttttttttttttttttttttttt

SEQ ID NO: 8385 - DNA, 84 bp, Artificial
  Barcode component
  misc_feature (33)..(34): n is a, c, g, or t
  misc_feature (43)..(44): n is a, c, g, or t
  misc_feature (53)..(54): n is a, c, g, or t
tttttttaagcagtggtatcaacgcagagtacnntgaaggcannatcaggctnntttttttttttttttttttttttttttttt

SEQ ID NO: 8386 - DNA, 84 bp, Artificial
  Barcode component
  misc_feature (33)..(34): n is a, c, g, or t
  misc_feature (43)..(44): n is a, c, g, or t
  misc_feature (53)..(54): n is a, c, g, or t
tttttttaagcagtggtatcaacgcagagtacnntgaaggcanncaagttcgnntttttttttttttttttttttttttttttt

SEQ ID NO: 8387 - DNA, 84 bp, Artificial
  Barcode component
  misc_feature (33)..(34): n is a, c, g, or t
  misc_feature (43)..(44): n is a, c, g, or t
  misc_feature (53)..(54): n is a, c, g, or t
tttttttaagcagtggtatcaacgcagagtacnntgaaggcanntagccaganntttttttttttttttttttttttttttttt

SEQ ID NO: 8388 - DNA, 84 bp, Artificial
  Barcode component
  misc_feature (33)..(34): n is a, c, g, or t
  misc_feature (43)..(44): n is a, c, g, or t
  misc_feature (53)..(54): n is a, c, g, or t
tttttttaagcagtggtatcaacgcagagtacnntgaaggcanncaatcacgnntttttttttttttttttttttttttttttt

SEQ ID NO: 8389 - DNA, 84 bp, Artificial
  Barcode component
  misc_feature (33)..(34): n is a, c, g, or t
  misc_feature (43)..(44): n is a, c, g, or t
  misc_feature (53)..(54): n is a, c, g, or t
tttttttaagcagtggtatcaacgcagagtacnntgaaggcanngcaacaagnntttttttttttttttttttttttttttttt

SEQ ID NO: 8390 - DNA, 84 bp, Artificial
  Barcode component
  misc_feature (33)..(34): n is a, c, g, or t
  misc_feature (43)..(44): n is a, c, g, or t
  misc_feature (53)..(54): n is a, c, g, or t
tttttttaagcagtggtatcaacgcagagtacnntgaaggcanncacgacaanntttttttttttttttttttttttttttttt

SEQ ID NO: 8391 - DNA, 84 bp, Artificial
  Barcode component
  misc_feature (33)..(34): n is a, c, g, or t
  misc_feature (43)..(44): n is a, c, g, or t
  misc_feature (53)..(54): n is a, c, g, or t
tttttttaagcagtggtatcaacgcagagtacnntgaaggcanntacggaganntttttttttttttttttttttttttttttt

SEQ ID NO: 8392 - DNA, 84 bp, Artificial
  Barcode component
  misc_feature (33)..(34): n is a, c, g, or t
  misc_feature (43)..(44): n is a, c, g, or t
  misc_feature (53)..(54): n is a, c, g, or t
tttttttaagcagtggtatcaacgcagagtacnntgaaggcanncgacaaganntttttttttttttttttttttttttttttt

SEQ ID NO: 8393 - DNA, 84 bp, Artificial
  Barcode component
  misc_feature (33)..(34): n is a, c, g, or t
  misc_feature (43)..(44): n is a, c, g, or t
  misc_feature (53)..(54): n is a, c, g, or t
tttttttaagcagtggtatcaacgcagagtacnntgaaggcanncgaagtganntttttttttttttttttttttttttttttt

SEQ ID NO: 8394 - DNA, 84 bp, Artificial
  Barcode component
  misc_feature (33)..(34): n is a, c, g, or t
  misc_feature (43)..(44): n is a, c, g, or t
  misc_feature (53)..(54): n is a, c, g, or t
tttttttaagcagtggtatcaacgcagagtacnntgaaggcannagctggtanntttttttttttttttttttttttttttttt

SEQ ID NO: 8395 - DNA, 84 bp, Artificial
  Barcode component
  misc_feature (33)..(34): n is a, c, g, or t
  misc_feature (43)..(44): n is a, c, g, or t
  misc_feature (53)..(54): n is a, c, g, or t
tttttttaagcagtggtatcaacgcagagtacnntgaaggcannaactaggcnntttttttttttttttttttttttttttttt

SEQ ID NO: 8396 - DNA, 84 bp, Artificial
  Barcode component
  misc_feature (33)..(34): n is a, c, g, or t
  misc_feature (43)..(44): n is a, c, g, or t
  misc_feature (53)..(54): n is a, c, g, or t
tttttttaagcagtggtatcaacgcagagtacnntgaaggcanncagcaagtnntttttttttttttttttttttttttttttt

SEQ ID NO: 8397 - DNA, 84 bp, Artificial
  Barcode component
  misc_feature (33)..(34): n is a, c, g, or t
  misc_feature (43)..(44): n is a, c, g, or t
  misc_feature (53)..(54): n is a, c, g, or t
tttttttaagcagtggtatcaacgcagagtacnntgaaggcannacgaggtanntttttttttttttttttttttttttttttt

SEQ ID NO: 8398 - DNA, 84 bp, Artificial
  Barcode component
  misc_feature (33)..(34): n is a, c, g, or t
  misc_feature (43)..(44): n is a, c, g, or t
  misc_feature (53)..(54): n is a, c, g, or t
tttttttaagcagtggtatcaacgcagagtacnntgaaggcanncatcttccnntttttttttttttttttttttttttttttt

SEQ ID NO: 8399 - DNA, 84 bp, Artificial
  Barcode component
  misc_feature (33)..(34): n is a, c, g, or t
  misc_feature (43)..(44): n is a, c, g, or t
  misc_feature (53)..(54): n is a, c, g, or t
tttttttaagcagtggtatcaacgcagagtacnntgaaggcanncctgaatcnntttttttttttttttttttttttttttttt

SEQ ID NO: 8400 - DNA, 84 bp, Artificial
  Barcode component
  misc_feature (33)..(34): n is a, c, g, or t
  misc_feature (43)..(44): n is a, c, g, or t
  misc_feature (53)..(54): n is a, c, g, or t
tttttttaagcagtggtatcaacgcagagtacnntgaaggcanntgcagactnntttttttttttttttttttttttttttttt

SEQ ID NO: 8401 - DNA, 84 bp, Artificial
  Barcode component
  misc_feature (33)..(34): n is a, c, g, or t
  misc_feature (43)..(44): n is a, c, g, or t
  misc_feature (53)..(54): n is a, c, g, or t
tttttttaagcagtggtatcaacgcagagtacnntgaaggcannagatgtggnntttttttttttttttttttttttttttttt

SEQ ID NO: 8402 - DNA, 84 bp, Artificial
  Barcode component
  misc_feature (33)..(34): n is a, c, g, or t
  misc_feature (43)..(44): n is a, c, g, or t
  misc_feature (53)..(54): n is a, c, g, or t
tttttttaagcagtggtatcaacgcagagtacnntgaaggcannagttcgacnntttttttttttttttttttttttttttttt

SEQ ID NO: 8403 - DNA, 84 bp, Artificial
  Barcode component
  misc_feature (33)..(34): n is a, c, g, or t
  misc_feature (43)..(44): n is a, c, g, or t
  misc_feature (53)..(54): n is a, c, g, or t
tttttttaagcagtggtatcaacgcagagtacnntgaaggcannacaacctcnntttttttttttttttttttttttttttttt

SEQ ID NO: 8404 - DNA, 84 bp, Artificial
  Barcode component
  misc_feature (33)..(34): n is a, c, g, or t
  misc_feature (43)..(44): n is a, c, g, or t
  misc_feature (53)..(54): n is a, c, g, or t
tttttttaagcagtggtatcaacgcagagtacnntgaaggcanncatggtagnntttttttttttttttttttttttttttttt

SEQ ID NO: 8405 - DNA, 84 bp, Artificial
  Barcode component
  misc_feature (33)..(34): n is a, c, g, or t
  misc_feature (43)..(44): n is a, c, g, or t
  misc_feature (53)..(54): n is a, c, g, or t
tttttttaagcagtggtatcaacgcagagtacnntgaaggcanncgtatctcnntttttttttttttttttttttttttttttt

SEQ ID NO: 8406 - DNA, 84 bp, Artificial
  Barcode component
  misc_feature (33)..(34): n is a, c, g, or t
  misc_feature (43)..(44): n is a, c, g, or t
  misc_feature (53)..(54): n is a, c, g, or t
tttttttaagcagtggtatcaacgcagagtacnntgaaggcanncctagttcnntttttttttttttttttttttttttttttt

SEQ ID NO: 8407 - DNA, 84 bp, Artificial
  Barcode component
  misc_feature (33)..(34): n is a, c, g, or t
  misc_feature (43)..(44): n is a, c, g, or t
  misc_feature (53)..(54): n is a, c, g, or t
tttttttaagcagtggtatcaacgcagagtacnntgaaggcanncaagagtcnntttttttttttttttttttttttttttttt

SEQ ID NO: 8408 - DNA, 84 bp, Artificial
  Barcode component
  misc_feature (33)..(34): n is a, c, g, or t
  misc_feature (43)..(44): n is a, c, g, or t
  misc_feature (53)..(54): n is a, c, g, or t
tttttttaagcagtggtatcaacgcagagtacnntccgatgannaatcggcanntttttttttttttttttttttttttttttt

SEQ ID NO: 8409 - DNA, 84 bp, Artificial
  Barcode component
  misc_feature (33)..(34): n is a, c, g, or t
  misc_feature (43)..(44): n is a, c, g, or t
  misc_feature (53)..(54): n is a, c, g, or t
tttttttaagcagtggtatcaacgcagagtacnntccgatganntacggcatnntttttttttttttttttttttttttttttt

SEQ ID NO: 8410 - DNA, 84 bp, Artificial
  Barcode component
  misc_feature (33)..(34): n is a, c, g, or t
  misc_feature (43)..(44): n is a, c, g, or t
  misc_feature (53)..(54): n is a, c, g, or t
tttttttaagcagtggtatcaacgcagagtacnntccgatgannttggatcgnntttttttttttttttttttttttttttttt

SEQ ID NO: 8411 - DNA, 84 bp, Artificial
  Barcode component
  misc_feature (33)..(34): n is a, c, g, or t
  misc_feature (43)..(44): n is a, c, g, or t
  misc_feature (53)..(54): n is a, c, g, or t
tttttttaagcagtggtatcaacgcagagtacnntccgatganntggaacganntttttttttttttttttttttttttttttt

SEQ ID NO: 8412 - DNA, 84 bp, Artificial
  Barcode component
  misc_feature (33)..(34): n is a, c, g, or t
  misc_feature (43)..(44): n is a, c, g, or t
  misc_feature (53)..(54): n is a, c, g, or t
tttttttaagcagtggtatcaacgcagagtacnntccgatgannggcaatcanntttttttttttttttttttttttttttttt

SEQ ID NO: 8413 - DNA, 84 bp, Artificial
  Barcode component
  misc_feature (33)..(34): n is a, c, g, or t
  misc_feature (43)..(44): n is a, c, g, or t
  misc_feature (53)..(54): n is a, c, g, or t
tttttttaagcagtggtatcaacgcagagtacnntccgatganngaatccganntttttttttttttttttttttttttttttt

SEQ ID NO: 8414 - DNA, 84 bp, Artificial
  Barcode component
  misc_feature (33)..(34): n is a, c, g, or t
  misc_feature (43)..(44): n is a, c, g, or t
  misc_feature (53)..(54): n is a, c, g, or t
tttttttaagcagtggtatcaacgcagagtacnntccgatgannttacggtgnntttttttttttttttttttttttttttttt

SEQ ID NO: 8415 - DNA, 84 bp, Artificial
  Barcode component
  misc_feature (33)..(34): n is a, c, g, or t
  misc_feature (43)..(44): n is a, c, g, or t
  misc_feature (53)..(54): n is a, c, g, or t
tttttttaagcagtggtatcaacgcagagtacnntccgatganncatatcggnntttttttttttttttttttttttttttttt

SEQ ID NO: 8416 - DNA, 84 bp, Artificial
  Barcode component
  misc_feature (33)..(34): n is a, c, g, or t
  misc_feature (43)..(44): n is a, c, g, or t
  misc_feature (53)..(54): n is a, c, g, or t
tttttttaagcagtggtatcaacgcagagtacnntccgatganncttcggtanntttttttttttttttttttttttttttttt

SEQ ID NO: 8417 - DNA, 84 bp, Artificial
  Barcode component
  misc_feature (33)..(34): n is a, c, g, or t
  misc_feature (43)..(44): n is a, c, g, or t
  misc_feature (53)..(54): n is a, c, g, or t
tttttttaagcagtggtatcaacgcagagtacnntccgatganntcctaacgnntttttttttttttttttttttttttttttt

SEQ ID NO: 8418 - DNA, 84 bp, Artificial
  Barcode component
  misc_feature (33)..(34): n is a, c, g, or t
  misc_feature (43)..(44): n is a, c, g, or t
  misc_feature (53)..(54): n is a, c, g, or t
tttttttaagcagtggtatcaacgcagagtacnntccgatganngtaagccanntttttttttttttttttttttttttttttt

SEQ ID NO: 8419 - DNA, 84 bp, Artificial
  Barcode component
  misc_feature (33)..(34): n is a, c, g, or t
  misc_feature (43)..(44): n is a, c, g, or t
  misc_feature (53)..(54): n is a, c, g, or t
tttttttaagcagtggtatcaacgcagagtacnntccgatganntaaggtggnntttttttttttttttttttttttttttttt

SEQ ID NO: 8420 - DNA, 84 bp, Artificial
  Barcode component
  misc_feature (33)..(34): n is a, c, g, or t
  misc_feature (43)..(44): n is a, c, g, or t
  misc_feature (53)..(54): n is a, c, g, or t
tttttttaagcagtggtatcaacgcagagtacnntccgatgannggtaagctnntttttttttttttttttttttttttttttt

SEQ ID NO: 8421 - DNA, 84 bp, Artificial
  Barcode component
  misc_feature (33)..(34): n is a, c, g, or t
  misc_feature (43)..(44): n is a, c, g, or t
  misc_feature (53)..(54): n is a, c, g, or t
tttttttaagcagtggtatcaacgcagagtacnntccgatganntgtgtcganntttttttttttttttttttttttttttttt

SEQ ID NO: 8422 - DNA, 84 bp, Artificial
  Barcode component
  misc_feature (33)..(34): n is a, c, g, or t
  misc_feature (43)..(44): n is a, c, g, or t
  misc_feature (53)..(54): n is a, c, g, or t
tttttttaagcagtggtatcaacgcagagtacnntccgatganngagcatganntttttttttttttttttttttttttttttt

SEQ ID NO: 8423 - DNA, 84 bp, Artificial
  Barcode component
  misc_feature (33)..(34): n is a, c, g, or t
  misc_feature (43)..(44): n is a, c, g, or t
  misc_feature (53)..(54): n is a, c, g, or t
tttttttaagcagtggtatcaacgcagagtacnntccgatganntcgaagtcnntttttttttttttttttttttttttttttt

SEQ ID NO: 8424 - DNA, 84 bp, Artificial
  Barcode component
  misc_feature (33)..(34): n is a, c, g, or t
  misc_feature (43)..(44): n is a, c, g, or t
  misc_feature (53)..(54): n is a, c, g, or t
tttttttaagcagtggtatcaacgcagagtacnntccgatgannggtgaacanntttttttttttttttttttttttttttttt

SEQ ID NO: 8425 - DNA, 84 bp, Artificial
  Barcode component
  misc_feature (33)..(34): n is a, c, g, or t
  misc_feature (43)..(44): n is a, c, g, or t
  misc_feature (53)..(54): n is a, c, g, or t
tttttttaagcagtggtatcaacgcagagtacnntccgatgannacatgcacnntttttttttttttttttttttttttttttt

SEQ ID NO: 8426 - DNA, 84 bp, Artificial
  Barcode component
  misc_feature (33)..(34): n is a, c, g, or t
  misc_feature (43)..(44): n is a, c, g, or t
  misc_feature (53)..(54): n is a, c, g, or t
tttttttaagcagtggtatcaacgcagagtacnntccgatgannccaacagtnntttttttttttttttttttttttttttttt

SEQ ID NO: 8427 - DNA, 84 bp, Artificial
  Barcode component
  misc_feature (33)..(34): n is a, c, g, or t
  misc_feature (43)..(44): n is a, c, g, or t
  misc_feature (53)..(54): n is a, c, g, or t
tttttttaagcagtggtatcaacgcagagtacnntccgatgannagaacagcnntttttttttttttttttttttttttttttt

SEQ ID NO: 8428 - DNA, 84 bp, Artificial
  Barcode component
  misc_feature (33)..(34): n is a, c, g, or t
  misc_feature (43)..(44): n is a, c, g, or t
  misc_feature (53)..(54): n is a, c, g, or t
tttttttaagcagtggtatcaacgcagagtacnntccgatganngaacacgtnntttttttttttttttttttttttttttttt

SEQ ID NO: 8429 - DNA, 84 bp, Artificial
  Barcode component
  misc_feature (33)..(34): n is a, c, g, or t
  misc_feature (43)..(44): n is a, c, g, or t
  misc_feature (53)..(54): n is a, c, g, or t
tttttttaagcagtggtatcaacgcagagtacnntccgatgannggtcttcanntttttttttttttttttttttttttttttt

SEQ ID NO: 8430 - DNA, 84 bp, Artificial
  Barcode component
  misc_feature (33)..(34): n is a, c, g, or t
  misc_feature (43)..(44): n is a, c, g, or t
  misc_feature (53)..(54): n is a, c, g, or t
tttttttaagcagtggtatcaacgcagagtacnntccgatgannaggttcagnntttttttttttttttttttttttttttttt

SEQ ID NO: 8431 - DNA, 84 bp, Artificial
  Barcode component
  misc_feature (33)..(34): n is a, c, g, or t
  misc_feature (43)..(44): n is a, c, g, or t
  misc_feature (53)..(54): n is a, c, g, or t
tttttttaagcagtggtatcaacgcagagtacnntccgatgannctagagcanntttttttttttttttttttttttttttttt

SEQ ID NO: 8432 - DNA, 84 bp, Artificial
  Barcode component
  misc_feature (33)..(34): n is a, c, g, or t
  misc_feature (43)..(44): n is a, c, g, or t
  misc_feature (53)..(54): n is a, c, g, or t
tttttttaagcagtggtatcaacgcagagtacnntccgatganncttctagcnntttttttttttttttttttttttttttttt

SEQ ID NO: 8433 - DNA, 84 bp, Artificial
  Barcode component
  misc_feature (33)..(34): n is a, c, g, or t
  misc_feature (43)..(44): n is a, c, g, or t
  misc_feature (53)..(54): n is a, c, g, or t
tttttttaagcagtggtatcaacgcagagtacnntccgatganngagtaacgnntttttttttttttttttttttttttttttt

SEQ ID NO: 8434 - DNA, 84 bp, Artificial
  Barcode component
  misc_feature (33)..(34): n is a, c, g, or t
  misc_feature (43)..(44): n is a, c, g, or t
  misc_feature (53)..(54): n is a, c, g, or t
tttttttaagcagtggtatcaacgcagagtacnntccgatgannctaagaggnntttttttttttttttttttttttttttttt

SEQ ID NO: 8435 - DNA, 84 bp, Artificial
  Barcode component
  misc_feature (33)..(34): n is a, c, g, or t
  misc_feature (43)..(44): n is a, c, g, or t
  misc_feature (53)..(54): n is a, c, g, or t
tttttttaagcagtggtatcaacgcagagtacnntccgatgannacgtgtagnntttttttttttttttttttttttttttttt

SEQ ID NO: 8436 - DNA, 84 bp, Artificial
  Barcode component
  misc_feature (33)..(34): n is a, c, g, or t
  misc_feature (43)..(44): n is a, c, g, or t
  misc_feature (53)..(54): n is a, c, g, or t
tttttttaagcagtggtatcaacgcagagtacnntccgatgannactacaggnntttttttttttttttttttttttttttttt

SEQ ID NO: 8437 - DNA, 84 bp, Artificial
  Barcode component
  misc_feature (33)..(34): n is a, c, g, or t
  misc_feature (43)..(44): n is a, c, g, or t
  misc_feature (53)..(54): n is a, c, g, or t
tttttttaagcagtggtatcaacgcagagtacnntccgatganntacaggtcnntttttttttttttttttttttttttttttt

SEQ ID NO: 8438 - DNA, 84 bp, Artificial
  Barcode component
  misc_feature (33)..(34): n is a, c, g, or t
  misc_feature (43)..(44): n is a, c, g, or t
  misc_feature (53)..(54): n is a, c, g, or t
tttttttaagcagtggtatcaacgcagagtacnntccgatgannctcacatgnntttttttttttttttttttttttttttttt

SEQ ID NO: 8439 - DNA, 84 bp, Artificial
  Barcode component
  misc_feature (33)..(34): n is a, c, g, or t
  misc_feature (43)..(44): n is a, c, g, or t
  misc_feature (53)..(54): n is a, c, g, or t
tttttttaagcagtggtatcaacgcagagtacnntccgatgannactaggagnntttttttttttttttttttttttttttttt

SEQ ID NO: 8440 - DNA, 84 bp, Artificial
  Barcode component
  misc_feature (33)..(34): n is a, c, g, or t
  misc_feature (43)..(44): n is a, c, g, or t
  misc_feature (53)..(54): n is a, c, g, or t
tttttttaagcagtggtatcaacgcagagtacnntccgatgannccatagganntttttttttttttttttttttttttttttt

SEQ ID NO: 8441 - DNA, 84 bp, Artificial
  Barcode component
  misc_feature (33)..(34): n is a, c, g, or t
  misc_feature (43)..(44): n is a, c, g, or t
  misc_feature (53)..(54): n is a, c, g, or t
tttttttaagcagtggtatcaacgcagagtacnntccgatgannggagaatcnntttttttttttttttttttttttttttttt

SEQ ID NO: 8442 - DNA, 84 bp, Artificial
  Barcode component
  misc_feature (33)..(34): n is a, c, g, or t
  misc_feature (43)..(44): n is a, c, g, or t
  misc_feature (53)..(54): n is a, c, g, or t
tttttttaagcagtggtatcaacgcagagtacnntccgatganngccaagaanntttttttttttttttttttttttttttttt

SEQ ID NO: 8443 - DNA, 84 bp, Artificial
  Barcode component
  misc_feature (33)..(34): n is a, c, g, or t
  misc_feature (43)..(44): n is a, c, g, or t
  misc_feature (53)..(54): n is a, c, g, or t
tttttttaagcagtggtatcaacgcagagtacnntccgatgannaaggcaagnntttttttttttttttttttttttttttttt

SEQ ID NO: 8444 - DNA, 84 bp, Artificial
  Barcode component
  misc_feature (33)..(34): n is a, c, g, or t
  misc_feature (43)..(44): n is a, c, g, or t
  misc_feature (53)..(54): n is a, c, g, or t
tttttttaagcagtggtatcaacgcagagtacnntccgatgannaatgtcgcnntttttttttttttttttttttttttttttt

SEQ ID NO: 8445 - DNA, 84 bp, Artificial
  Barcode component
  misc_feature (33)..(34): n is a, c, g, or t
  misc_feature (43)..(44): n is a, c, g, or t
  misc_feature (53)..(54): n is a, c, g, or t
tttttttaagcagtggtatcaacgcagagtacnntccgatgannatggaaccnntttttttttttttttttttttttttttttt

SEQ ID NO: 8446 - DNA, 84 bp, Artificial
  Barcode component
  misc_feature (33)..(34): n is a, c, g, or t
  misc_feature (43)..(44): n is a, c, g, or t
  misc_feature (53)..(54): n is a, c, g, or t
tttttttaagcagtggtatcaacgcagagtacnntccgatgannagaggcatnntttttttttttttttttttttttttttttt

SEQ ID NO: 8447 - DNA, 84 bp, Artificial
  Barcode component
  misc_feature (33)..(34): n is a, c, g, or t
  misc_feature (43)..(44): n is a, c, g, or t
  misc_feature (53)..(54): n is a, c, g, or t
tttttttaagcagtggtatcaacgcagagtacnntccgatganntgcatagcnntttttttttttttttttttttttttttttt

SEQ ID NO: 8448 - DNA, 84 bp, Artificial
  Barcode component
  misc_feature (33)..(34): n is a, c, g, or t
  misc_feature (43)..(44): n is a, c, g, or t
  misc_feature (53)..(54): n is a, c, g, or t
tttttttaagcagtggtatcaacgcagagtacnntccgatgannctaacgganntttttttttttttttttttttttttttttt

SEQ ID NO: 8449 - DNA, 84 bp, Artificial
  Barcode component
  misc_feature (33)..(34): n is a, c, g, or t
  misc_feature (43)..(44): n is a, c, g, or t
  misc_feature (53)..(54): n is a, c, g, or t
tttttttaagcagtggtatcaacgcagagtacnntccgatganntatcgaggnntttttttttttttttttttttttttttttt

SEQ ID NO: 8450 - DNA, 84 bp, Artificial
  Barcode component
  misc_feature (33)..(34): n is a, c, g, or t
  misc_feature (43)..(44): n is a, c, g, or t
  misc_feature (53)..(54): n is a, c, g, or t
tttttttaagcagtggtatcaacgcagagtacnntccgatganncatagcctnntttttttttttttttttttttttttttttt

SEQ ID NO: 8451 - DNA, 84 bp, Artificial
  Barcode component
  misc_feature (33)..(34): n is a, c, g, or t
  misc_feature (43)..(44): n is a, c, g, or t
  misc_feature (53)..(54): n is a, c, g, or t
tttttttaagcagtggtatcaacgcagagtacnntccgatgannatcgagacnntttttttttttttttttttttttttttttt

SEQ ID NO: 8452 - DNA, 84 bp, Artificial
  Barcode component
  misc_feature (33)..(34): n is a, c, g, or t
  misc_feature (43)..(44): n is a, c, g, or t
  misc_feature (53)..(54): n is a, c, g, or t
tttttttaagcagtggtatcaacgcagagtacnntccgatgannggaagagtnntttttttttttttttttttttttttttttt

SEQ ID NO: 8453 - DNA, 84 bp, Artificial
  Barcode component
  misc_feature (33)..(34): n is a, c, g, or t
  misc_feature (43)..(44): n is a, c, g, or t
  misc_feature (53)..(54): n is a, c, g, or t
tttttttaagcagtggtatcaacgcagagtacnntccgatgannccaagtagnntttttttttttttttttttttttttttttt

SEQ ID NO: 8454 - DNA, 84 bp, Artificial
  Barcode component
  misc_feature (33)..(34): n is a, c, g, or t
  misc_feature (43)..(44): n is a, c, g, or t
  misc_feature (53)..(54): n is a, c, g, or t
tttttttaagcagtggtatcaacgcagagtacnntccgatgannctgaacagnntttttttttttttttttttttttttttttt

SEQ ID NO: 8455 - DNA, 84 bp, Artificial
  Barcode component
  misc_feature (33)..(34): n is a, c, g, or t
  misc_feature (43)..(44): n is a, c, g, or t
  misc_feature (53)..(54): n is a, c, g, or t
tttttttaagcagtggtatcaacgcagagtacnntccgatganngtaggttcnntttttttttttttttttttttttttttttt

SEQ ID NO: 8456 - DNA, 84 bp, Artificial
  Barcode component
  misc_feature (33)..(34): n is a, c, g, or t
  misc_feature (43)..(44): n is a, c, g, or t
  misc_feature (53)..(54): n is a, c, g, or t
tttttttaagcagtggtatcaacgcagagtacnntccgatganngtatggacnntttttttttttttttttttttttttttttt

SEQ ID NO: 8457 - DNA, 84 bp, Artificial
  Barcode component
  misc_feature (33)..(34): n is a, c, g, or t
  misc_feature (43)..(44): n is a, c, g, or t
  misc_feature (53)..(54): n is a, c, g, or t
tttttttaagcagtggtatcaacgcagagtacnntccgatganntcgcaacanntttttttttttttttttttttttttttttt

SEQ ID NO: 8458 - DNA, 84 bp, Artificial
  Barcode component
  misc_feature (33)..(34): n is a, c, g, or t
  misc_feature (43)..(44): n is a, c, g, or t
  misc_feature (53)..(54): n is a, c, g, or t
tttttttaagcagtggtatcaacgcagagtacnntccgatgannccgctaatnntttttttttttttttttttttttttttttt

SEQ ID NO: 8459 - DNA, 84 bp, Artificial
  Barcode component
  misc_feature (33)..(34): n is a, c, g, or t
  misc_feature (43)..(44): n is a, c, g, or t
  misc_feature (53)..(54): n is a, c, g, or t
tttttttaagcagtggtatcaacgcagagtacnntccgatganngattcgcanntttttttttttttttttttttttttttttt

SEQ ID NO: 8460 - DNA, 84 bp, Artificial
  Barcode component
  misc_feature (33)..(34): n is a, c, g, or t
  misc_feature (43)..(44): n is a, c, g, or t
  misc_feature (53)..(54): n is a, c, g, or t
tttttttaagcagtggtatcaacgcagagtacnntccgatganncgatggaanntttttttttttttttttttttttttttttt

SEQ ID NO: 8461 - DNA, 84 bp, Artificial
  Barcode component
  misc_feature (33)..(34): n is a, c, g, or t
  misc_feature (43)..(44): n is a, c, g, or t
  misc_feature (53)..(54): n is a, c, g, or t
tttttttaagcagtggtatcaacgcagagtacnntccgatgannagcaagganntttttttttttttttttttttttttttttt

SEQ ID NO: 8462 - DNA, 84 bp, Artificial
  Barcode component
  misc_feature (33)..(34): n is a, c, g, or t
  misc_feature (43)..(44): n is a, c, g, or t
  misc_feature (53)..(54): n is a, c, g, or t
tttttttaagcagtggtatcaacgcagagtacnntccgatganncgtagcaanntttttttttttttttttttttttttttttt

SEQ ID NO: 8463 - DNA, 84 bp, Artificial
  Barcode component
  misc_feature (33)..(34): n is a, c, g, or t
  misc_feature (43)..(44): n is a, c, g, or t
  misc_feature (53)..(54): n is a, c, g, or t
tttttttaagcagtggtatcaacgcagagtacnntccgatganntggcagtanntttttttttttttttttttttttttttttt

SEQ ID NO: 8464 - DNA, 84 bp, Artificial
  Barcode component
  misc_feature (33)..(34): n is a, c, g, or t
  misc_feature (43)..(44): n is a, c, g, or t
  misc_feature (53)..(54): n is a, c, g, or t
tttttttaagcagtggtatcaacgcagagtacnntccgatganncggtagttnntttttttttttttttttttttttttttttt

SEQ ID NO: 8465 - DNA, 84 bp, Artificial
  Barcode component
  misc_feature (33)..(34): n is a, c, g, or t
  misc_feature (43)..(44): n is a, c, g, or t
  misc_feature (53)..(54): n is a, c, g, or t
tttttttaagcagtggtatcaacgcagagtacnntccgatganntgacttcgnntttttttttttttttttttttttttttttt

SEQ ID NO: 8466 - DNA, 84 bp, Artificial
  Barcode component
  misc_feature (33)..(34): n is a, c, g, or t
  misc_feature (43)..(44): n is a, c, g, or t
  misc_feature (53)..(54): n is a, c, g, or t
tttttttaagcagtggtatcaacgcagagtacnntccgatganngagtgcaanntttttttttttttttttttttttttttttt

SEQ ID NO: 8467 - DNA, 84 bp, Artificial
  Barcode component
  misc_feature (33)..(34): n is a, c, g, or t
  misc_feature (43)..(44): n is a, c, g, or t
  misc_feature (53)..(54): n is a, c, g, or t
tttttttaagcagtggtatcaacgcagagtacnntccgatgannacggtaacnntttttttttttttttttttttttttttttt

SEQ ID NO: 8468 - DNA, 84 bp, Artificial
  Barcode component
  misc_feature (33)..(34): n is a, c, g, or t
  misc_feature (43)..(44): n is a, c, g, or t
  misc_feature (53)..(54): n is a, c, g, or t
tttttttaagcagtggtatcaacgcagagtacnntccgatgannaagtggtgnntttttttttttttttttttttttttttttt

SEQ ID NO: 8469 - DNA, 84 bp, Artificial
  Barcode component
  misc_feature (33)..(34): n is a, c, g, or t
  misc_feature (43)..(44): n is a, c, g, or t
  misc_feature (53)..(54): n is a, c, g, or t
tttttttaagcagtggtatcaacgcagagtacnntccgatgannggagacaanntttttttttttttttttttttttttttttt

SEQ ID NO: 8470 - DNA, 84 bp, Artificial
  Barcode component
  misc_feature (33)..(34): n is a, c, g, or t
  misc_feature (43)..(44): n is a, c, g, or t
  misc_feature (53)..(54): n is a, c, g, or t
tttttttaagcagtggtatcaacgcagagtacnntccgatganntcaaggacnntttttttttttttttttttttttttttttt

SEQ ID NO: 8471 - DNA, 84 bp, Artificial
  Barcode component
  misc_feature (33)..(34): n is a, c, g, or t
  misc_feature (43)..(44): n is a, c, g, or t
  misc_feature (53)..(54): n is a, c, g, or t
tttttttaagcagtggtatcaacgcagagtacnntccgatgannaagagagcnntttttttttttttttttttttttttttttt

SEQ ID NO: 8472 - DNA, 84 bp, Artificial
  Barcode component
  misc_feature (33)..(34): n is a, c, g, or t
  misc_feature (43)..(44): n is a, c, g, or t
  misc_feature (53)..(54): n is a, c, g, or t
tttttttaagcagtggtatcaacgcagagtacnntccgatganncgagagatnntttttttttttttttttttttttttttttt

SEQ ID NO: 8473 - DNA, 84 bp, Artificial
  Barcode component
  misc_feature (33)..(34): n is a, c, g, or t
  misc_feature (43)..(44): n is a, c, g, or t
  misc_feature (53)..(54): n is a, c, g, or t
tttttttaagcagtggtatcaacgcagagtacnntccgatgannacagatggnntttttttttttttttttttttttttttttt

SEQ ID NO: 8474 - DNA, 84 bp, Artificial
  Barcode component
  misc_feature (33)..(34): n is a, c, g, or t
  misc_feature (43)..(44): n is a, c, g, or t
  misc_feature (53)..(54): n is a, c, g, or t
tttttttaagcagtggtatcaacgcagagtacnntccgatgannaggagtcanntttttttttttttttttttttttttttttt

SEQ ID NO: 8475 - DNA, 84 bp, Artificial
  Barcode component
  misc_feature (33)..(34): n is a, c, g, or t
  misc_feature (43)..(44): n is a, c, g, or t
  misc_feature (53)..(54): n is a, c, g, or t
tttttttaagcagtggtatcaacgcagagtacnntccgatganncgtgttacnntttttttttttttttttttttttttttttt

SEQ ID NO: 8476 - DNA, 84 bp, Artificial
  Barcode component
  misc_feature (33)..(34): n is a, c, g, or t
  misc_feature (43)..(44): n is a, c, g, or t
  misc_feature (53)..(54): n is a, c, g, or t
tttttttaagcagtggtatcaacgcagagtacnntccgatganntagtgtgcnntttttttttttttttttttttttttttttt

SEQ ID NO: 8477 - DNA, 84 bp, Artificial
  Barcode component
  misc_feature (33)..(34): n is a, c, g, or t
  misc_feature (43)..(44): n is a, c, g, or t
  misc_feature (53)..(54): n is a, c, g, or t
tttttttaagcagtggtatcaacgcagagtacnntccgatgannctcatgacnntttttttttttttttttttttttttttttt

SEQ ID NO: 8478 - DNA, 84 bp, Artificial
  Barcode component
  misc_feature (33)..(34): n is a, c, g, or t
  misc_feature (43)..(44): n is a, c, g, or t
  misc_feature (53)..(54): n is a, c, g, or t
tttttttaagcagtggtatcaacgcagagtacnntccgatganngtatccagnntttttttttttttttttttttttttttttt

SEQ ID NO: 8479 - DNA, 84 bp, Artificial
  Barcode component
  misc_feature (33)..(34): n is a, c, g, or t
  misc_feature (43)..(44): n is a, c, g, or t
  misc_feature (53)..(54): n is a, c, g, or t
tttttttaagcagtggtatcaacgcagagtacnntccgatgannacgcctatnntttttttttttttttttttttttttttttt

SEQ ID NO: 8480 - DNA, 84 bp, Artificial
  Barcode component
  misc_feature (33)..(34): n is a, c, g, or t
  misc_feature (43)..(44): n is a, c, g, or t
  misc_feature (53)..(54): n is a, c, g, or t
tttttttaagcagtggtatcaacgcagagtacnntccgatgannaacgacctnntttttttttttttttttttttttttttttt

SEQ ID NO: 8481 - DNA, 84 bp, Artificial
  Barcode component
  misc_feature (33)..(34): n is a, c, g, or t
  misc_feature (43)..(44): n is a, c, g, or t
  misc_feature (53)..(54): n is a, c, g, or t
tttttttaagcagtggtatcaacgcagagtacnntccgatgannatcaggctnntttttttttttttttttttttttttttttt

SEQ ID NO: 8482 - DNA, 84 bp, Artificial
  Barcode component
  misc_feature (33)..(34): n is a, c, g, or t
  misc_feature (43)..(44): n is a, c, g, or t
  misc_feature (53)..(54): n is a, c, g, or t
tttttttaagcagtggtatcaacgcagagtacnntccgatganncaagttcgnntttttttttttttttttttttttttttttt

SEQ ID NO: 8483 - DNA, 84 bp, Artificial
  Barcode component
  misc_feature (33)..(34): n is a, c, g, or t
  misc_feature (43)..(44): n is a, c, g, or t
  misc_feature (53)..(54): n is a, c, g, or t
tttttttaagcagtggtatcaacgcagagtacnntccgatganntagccaganntttttttttttttttttttttttttttttt

SEQ ID NO: 8484 - DNA, 84 bp, Artificial
  Barcode component
  misc_feature (33)..(34): n is a, c, g, or t
  misc_feature (43)..(44): n is a, c, g, or t
  misc_feature (53)..(54): n is a, c, g, or t
tttttttaagcagtggtatcaacgcagagtacnntccgatganncaatcacgnntttttttttttttttttttttttttttttt

SEQ ID NO: 8485 - DNA, 84 bp, Artificial
  Barcode component
  misc_feature (33)..(34): n is a, c, g, or t
  misc_feature (43)..(44): n is a, c, g, or t
  misc_feature (53)..(54): n is a, c, g, or t
tttttttaagcagtggtatcaacgcagagtacnntccgatganngcaacaagnntttttttttttttttttttttttttttttt

SEQ ID NO: 8486 - DNA, 84 bp, Artificial
  Barcode component
  misc_feature (33)..(34): n is a, c, g, or t
  misc_feature (43)..(44): n is a, c, g, or t
  misc_feature (53)..(54): n is a, c, g, or t
tttttttaagcagtggtatcaacgcagagtacnntccgatganncacgacaanntttttttttttttttttttttttttttttt

SEQ ID NO: 8487 - DNA, 84 bp, Artificial
  Barcode component
  misc_feature (33)..(34): n is a, c, g, or t
  misc_feature (43)..(44): n is a, c, g, or t
  misc_feature (53)..(54): n is a, c, g, or t
tttttttaagcagtggtatcaacgcagagtacnntccgatganntacggaganntttttttttttttttttttttttttttttt

SEQ ID NO: 8488 - DNA, 84 bp, Artificial
  Barcode component
  misc_feature (33)..(34): n is a, c, g, or t
  misc_feature (43)..(44): n is a, c, g, or t
  misc_feature (53)..(54): n is a, c, g, or t
tttttttaagcagtggtatcaacgcagagtacnntccgatganncgacaaganntttttttttttttttttttttttttttttt

SEQ ID NO: 8489 - DNA, 84 bp, Artificial
  Barcode component
  misc_feature (33)..(34): n is a, c, g, or t
  misc_feature (43)..(44): n is a, c, g, or t
  misc_feature (53)..(54): n is a, c, g, or t
tttttttaagcagtggtatcaacgcagagtacnntccgatganncgaagtganntttttttttttttttttttttttttttttt

SEQ ID NO: 8490 - DNA, 84 bp, Artificial
  Barcode component
  misc_feature (33)..(34): n is a, c, g, or t
  misc_feature (43)..(44): n is a, c, g, or t
  misc_feature (53)..(54): n is a, c, g, or t
tttttttaagcagtggtatcaacgcagagtacnntccgatgannagctggtanntttttttttttttttttttttttttttttt

SEQ ID NO: 8491 - DNA, 84 bp, Artificial
  Barcode component
  misc_feature (33)..(34): n is a, c, g, or t
  misc_feature (43)..(44): n is a, c, g, or t
  misc_feature (53)..(54): n is a, c, g, or t
tttttttaagcagtggtatcaacgcagagtacnntccgatgannaactaggcnntttttttttttttttttttttttttttttt

SEQ ID NO: 8492 - DNA, 84 bp, Artificial
  Barcode component
  misc_feature (33)..(34): n is a, c, g, or t
  misc_feature (43)..(44): n is a, c, g, or t
  misc_feature (53)..(54): n is a, c, g, or t
tttttttaagcagtggtatcaacgcagagtacnntccgatganncagcaagtnntttttttttttttttttttttttttttttt

SEQ ID NO: 8493 - DNA, 84 bp, Artificial
  Barcode component
  misc_feature (33)..(34): n is a, c, g, or t
  misc_feature (43)..(44): n is a, c, g, or t
  misc_feature (53)..(54): n is a, c, g, or t
tttttttaagcagtggtatcaacgcagagtacnntccgatgannacgaggtanntttttttttttttttttttttttttttttt

SEQ ID NO: 8494 - DNA, 84 bp, Artificial
  Barcode component
  misc_feature (33)..(34): n is a, c, g, or t
  misc_feature (43)..(44): n is a, c, g, or t
  misc_feature (53)..(54): n is a, c, g, or t
tttttttaagcagtggtatcaacgcagagtacnntccgatganncatcttccnntttttttttttttttttttttttttttttt

SEQ ID NO: 8495 - DNA, 84 bp, Artificial
  Barcode component
  misc_feature (33)..(34): n is a, c, g, or t
  misc_feature (43)..(44): n is a, c, g, or t
  misc_feature (53)..(54): n is a, c, g, or t
tttttttaagcagtggtatcaacgcagagtacnntccgatganncctgaatcnntttttttttttttttttttttttttttttt

SEQ ID NO: 8496 - DNA, 84 bp, Artificial
  Barcode component
  misc_feature (33)..(34): n is a, c, g, or t
  misc_feature (43)..(44): n is a, c, g, or t
  misc_feature (53)..(54): n is a, c, g, or t
tttttttaagcagtggtatcaacgcagagtacnntccgatganntgcagactnntttttttttttttttttttttttttttttt

SEQ ID NO: 8497 - DNA, 84 bp, Artificial
  Barcode component
  misc_feature (33)..(34): n is a, c, g, or t
  misc_feature (43)..(44): n is a, c, g, or t
  misc_feature (53)..(54): n is a, c, g, or t
tttttttaagcagtggtatcaacgcagagtacnntccgatgannagatgtggnntttttttttttttttttttttttttttttt

SEQ ID NO: 8498 - DNA, 84 bp, Artificial
  Barcode component
  misc_feature (33)..(34): n is a, c, g, or t
  misc_feature (43)..(44): n is a, c, g, or t
  misc_feature (53)..(54): n is a, c, g, or t
tttttttaagcagtggtatcaacgcagagtacnntccgatgannagttcgacnntttttttttttttttttttttttttttttt

SEQ ID NO: 8499 - DNA, 84 bp, Artificial
  Barcode component
  misc_feature (33)..(34): n is a, c, g, or t
  misc_feature (43)..(44): n is a, c, g, or t
  misc_feature (53)..(54): n is a, c, g, or t
tttttttaagcagtggtatcaacgcagagtacnntccgatgannacaacctcnntttttttttttttttttttttttttttttt

SEQ ID NO: 8500 - DNA, 84 bp, Artificial
  Barcode component
  misc_feature (33)..(34): n is a, c, g, or t
  misc_feature (43)..(44): n is a, c, g, or t
  misc_feature (53)..(54): n is a, c, g, or t
tttttttaagcagtggtatcaacgcagagtacnntccgatganncatggtagnntttttttttttttttttttttttttttttt

SEQ ID NO: 8501 - DNA, 84 bp, Artificial
  Barcode component
  misc_feature (33)..(34): n is a, c, g, or t
  misc_feature (43)..(44): n is a, c, g, or t
  misc_feature (53)..(54): n is a, c, g, or t
tttttttaagcagtggtatcaacgcagagtacnntccgatganncgtatctcnntttttttttttttttttttttttttttttt

SEQ ID NO: 8502 - DNA, 84 bp, Artificial
  Barcode component
  misc_feature (33)..(34): n is a, c, g, or t
  misc_feature (43)..(44): n is a, c, g, or t
  misc_feature (53)..(54): n is a, c, g, or t
tttttttaagcagtggtatcaacgcagagtacnntccgatganncctagttcnntttttttttttttttttttttttttttttt

SEQ ID NO: 8503 - DNA, 84 bp, Artificial
  Barcode component
  misc_feature (33)..(34): n is a, c, g, or t
  misc_feature (43)..(44): n is a, c, g, or t
  misc_feature (53)..(54): n is a, c, g, or t
tttttttaagcagtggtatcaacgcagagtacnntccgatganncaagagtcnntttttttttttttttttttttttttttttt

SEQ ID NO: 8504 - DNA, 84 bp, Artificial
  Barcode component
  misc_feature (33)..(34): n is a, c, g, or t
  misc_feature (43)..(44): n is a, c, g, or t
  misc_feature (53)..(54): n is a, c, g, or t
tttttttaagcagtggtatcaacgcagagtacnnacgaatccnnaatcggcanntttttttttttttttttttttttttttttt

SEQ ID NO: 8505 - DNA, 84 bp, Artificial
  Barcode component
  misc_feature (33)..(34): n is a, c, g, or t
  misc_feature (43)..(44): n is a, c, g, or t
  misc_feature (53)..(54): n is a, c, g, or t
tttttttaagcagtggtatcaacgcagagtacnnacgaatccnntacggcatnntttttttttttttttttttttttttttttt

SEQ ID NO: 8506 - DNA, 84 bp, Artificial
  Barcode component
  misc_feature (33)..(34): n is a, c, g, or t
  misc_feature (43)..(44): n is a, c, g, or t
  misc_feature (53)..(54): n is a, c, g, or t
tttttttaagcagtggtatcaacgcagagtacnnacgaatccnnttggatcgnntttttttttttttttttttttttttttttt

SEQ ID NO: 8507 - DNA, 84 bp, Artificial
  Barcode component
  misc_feature (33)..(34): n is a, c, g, or t
  misc_feature (43)..(44): n is a, c, g, or t
  misc_feature (53)..(54): n is a, c, g, or t
tttttttaagcagtggtatcaacgcagagtacnnacgaatccnntggaacganntttttttttttttttttttttttttttttt

SEQ ID NO: 8508 - DNA, 84 bp, Artificial
  Barcode component
  misc_feature (33)..(34): n is a, c, g, or t
  misc_feature (43)..(44): n is a, c, g, or t
  misc_feature (53)..(54): n is a, c, g, or t
tttttttaagcagtggtatcaacgcagagtacnnacgaatccnnggcaatcanntttttttttttttttttttttttttttttt

SEQ ID NO: 8509 - DNA, 84 bp, Artificial
  Barcode component
  misc_feature (33)..(34): n is a, c, g, or t
  misc_feature (43)..(44): n is a, c, g, or t
  misc_feature (53)..(54): n is a, c, g, or t
tttttttaagcagtggtatcaacgcagagtacnnacgaatccnngaatccganntttttttttttttttttttttttttttttt

SEQ ID NO: 8510 - DNA, 84 bp, Artificial
  Barcode component
  misc_feature (33)..(34): n is a, c, g, or t
  misc_feature (43)..(44): n is a, c, g, or t
  misc_feature (53)..(54): n is a, c, g, or t
tttttttaagcagtggtatcaacgcagagtacnnacgaatccnnttacggtgnntttttttttttttttttttttttttttttt

SEQ ID NO: 8511 - DNA, 84 bp, Artificial
  Barcode component
  misc_feature (33)..(34): n is a, c, g, or t
  misc_feature (43)..(44): n is a, c, g, or t
  misc_feature (53)..(54): n is a, c, g, or t
tttttttaagcagtggtatcaacgcagagtacnnacgaatccnncatatcggnntttttttttttttttttttttttttttttt

SEQ ID NO: 8512 - DNA, 84 bp, Artificial
  Barcode component
  misc_feature (33)..(34): n is a, c, g, or t
  misc_feature (43)..(44): n is a, c, g, or t
  misc_feature (53)..(54): n is a, c, g, or t
tttttttaagcagtggtatcaacgcagagtacnnacgaatccnncttcggtanntttttttttttttttttttttttttttttt

SEQ ID NO: 8513 - DNA, 84 bp, Artificial
  Barcode component
  misc_feature (33)..(34): n is a, c, g, or t
  misc_feature (43)..(44): n is a, c, g, or t
  misc_feature (53)..(54): n is a, c, g, or t
tttttttaagcagtggtatcaacgcagagtacnnacgaatccnntcctaacgnntttttttttttttttttttttttttttttt

SEQ ID NO: 8514 - DNA, 84 bp, Artificial
  Barcode component
  misc_feature (33)..(34): n is a, c, g, or t
  misc_feature (43)..(44): n is a, c, g, or t
  misc_feature (53)..(54): n is a, c, g, or t
tttttttaagcagtggtatcaacgcagagtacnnacgaatccnngtaagccanntttttttttttttttttttttttttttttt

SEQ ID NO: 8515 - DNA, 84 bp, Artificial
  Barcode component
  misc_feature (33)..(34): n is a, c, g, or t
  misc_feature (43)..(44): n is a, c, g, or t
  misc_feature (53)..(54): n is a, c, g, or t
tttttttaagcagtggtatcaacgcagagtacnnacgaatccnntaaggtggnntttttttttttttttttttttttttttttt

SEQ ID NO: 8516 - DNA, 84 bp, Artificial
  Barcode component
  misc_feature (33)..(34): n is a, c, g, or t
  misc_feature (43)..(44): n is a, c, g, or t
  misc_feature (53)..(54): n is a, c, g, or t
tttttttaagcagtggtatcaacgcagagtacnnacgaatccnnggtaagctnntttttttttttttttttttttttttttttt

SEQ ID NO: 8517 - DNA, 84 bp, Artificial
  Barcode component
  misc_feature (33)..(34): n is a, c, g, or t
  misc_feature (43)..(44): n is a, c, g, or t
  misc_feature (53)..(54): n is a, c, g, or t
tttttttaagcagtggtatcaacgcagagtacnnacgaatccnntgtgtcganntttttttttttttttttttttttttttttt

SEQ ID NO: 8518 - DNA, 84 bp, Artificial
  Barcode component
  misc_feature (33)..(34): n is a, c, g, or t
  misc_feature (43)..(44): n is a, c, g, or t
  misc_feature (53)..(54): n is a, c, g, or t
tttttttaagcagtggtatcaacgcagagtacnnacgaatccnngagcatganntttttttttttttttttttttttttttttt

SEQ ID NO: 8519 - DNA, 84 bp, Artificial
  Barcode component
  misc_feature (33)..(34): n is a, c, g, or t
  misc_feature (43)..(44): n is a, c, g, or t
  misc_feature (53)..(54): n is a, c, g, or t
tttttttaagcagtggtatcaacgcagagtacnnacgaatccnntcgaagtcnntttttttttttttttttttttttttttttt

SEQ ID NO: 8520 - DNA, 84 bp, Artificial
  Barcode component
  misc_feature (33)..(34): n is a, c, g, or t
  misc_feature (43)..(44): n is a, c, g, or t
  misc_feature (53)..(54): n is a, c, g, or t
tttttttaagcagtggtatcaacgcagagtacnnacgaatccnnggtgaacanntttttttttttttttttttttttttttttt

SEQ ID NO: 8521 - DNA, 84 bp, Artificial
  Barcode component
  misc_feature (33)..(34): n is a, c, g, or t
  misc_feature (43)..(44): n is a, c, g, or t
  misc_feature (53)..(54): n is a, c, g, or t
tttttttaagcagtggtatcaacgcagagtacnnacgaatccnnacatgcacnntttttttttttttttttttttttttttttt

SEQ ID NO: 8522 - DNA, 84 bp, Artificial
  Barcode component
  misc_feature (33)..(34): n is a, c, g, or t
  misc_feature (43)..(44): n is a, c, g, or t
  misc_feature (53)..(54): n is a, c, g, or t
tttttttaagcagtggtatcaacgcagagtacnnacgaatccnnccaacagtnntttttttttttttttttttttttttttttt

SEQ ID NO: 8523 - DNA, 84 bp, Artificial
  Barcode component
  misc_feature (33)..(34): n is a, c, g, or t
  misc_feature (43)..(44): n is a, c, g, or t
  misc_feature (53)..(54): n is a, c, g, or t
tttttttaagcagtggtatcaacgcagagtacnnacgaatccnnagaacagcnntttttttttttttttttttttttttttttt

SEQ ID NO: 8524 - DNA, 84 bp, Artificial
  Barcode component
  misc_feature (33)..(34): n is a, c, g, or t
  misc_feature (43)..(44): n is a, c, g, or t
  misc_feature (53)..(54): n is a, c, g, or t
tttttttaagcagtggtatcaacgcagagtacnnacgaatccnngaacacgtnntttttttttttttttttttttttttttttt

SEQ ID NO: 8525 - DNA, 84 bp, Artificial
  Barcode component
  misc_feature (33)..(34): n is a, c, g, or t
  misc_feature (43)..(44): n is a, c, g, or t
  misc_feature (53)..(54): n is a, c, g, or t
tttttttaagcagtggtatcaacgcagagtacnnacgaatccnnggtcttcanntttttttttttttttttttttttttttttt

SEQ ID NO: 8526 - DNA, 84 bp, Artificial
  Barcode component
  misc_feature (33)..(34): n is a, c, g, or t
  misc_feature (43)..(44): n is a, c, g, or t
  misc_feature (53)..(54): n is a, c, g, or t
tttttttaagcagtggtatcaacgcagagtacnnacgaatccnnaggttcagnntttttttttttttttttttttttttttttt

SEQ ID NO: 8527 - DNA, 84 bp, Artificial
  Barcode component
  misc_feature (33)..(34): n is a, c, g, or t
  misc_feature (43)..(44): n is a, c, g, or t
  misc_feature (53)..(54): n is a, c, g, or t
tttttttaagcagtggtatcaacgcagagtacnnacgaatccnnctagagcanntttttttttttttttttttttttttttttt

SEQ ID NO: 8528 - DNA, 84 bp, Artificial
  Barcode component
  misc_feature (33)..(34): n is a, c, g, or t
  misc_feature (43)..(44): n is a, c, g, or t
  misc_feature (53)..(54): n is a, c, g, or t
tttttttaagcagtggtatcaacgcagagtacnnacgaatccnncttctagcnntttttttttttttttttttttttttttttt

SEQ ID NO: 8529 - DNA, 84 bp, Artificial
  Barcode component
  misc_feature (33)..(34): n is a, c, g, or t
  misc_feature (43)..(44): n is a, c, g, or t
  misc_feature (53)..(54): n is a, c, g, or t
tttttttaagcagtggtatcaacgcagagtacnnacgaatccnngagtaacgnntttttttttttttttttttttttttttttt

SEQ ID NO: 8530 - DNA, 84 bp, Artificial
  Barcode component
  misc_feature (33)..(34): n is a, c, g, or t
  misc_feature (43)..(44): n is a, c, g, or t
  misc_feature (53)..(54): n is a, c, g, or t
tttttttaagcagtggtatcaacgcagagtacnnacgaatccnnctaagaggnntttttttttttttttttttttttttttttt

SEQ ID NO: 8531 - DNA, 84 bp, Artificial
  Barcode component
  misc_feature (33)..(34): n is a, c, g, or t
  misc_feature (43)..(44): n is a, c, g, or t
  misc_feature (53)..(54): n is a, c, g, or t
tttttttaagcagtggtatcaacgcagagtacnnacgaatccnnacgtgtagnntttttttttttttttttttttttttttttt

SEQ ID NO: 8532 - DNA, 84 bp, Artificial
  Barcode component
  misc_feature (33)..(34): n is a, c, g, or t
  misc_feature (43)..(44): n is a, c, g, or t
  misc_feature (53)..(54): n is a, c, g, or t
tttttttaagcagtggtatcaacgcagagtacnnacgaatccnnactacaggnntttttttttttttttttttttttttttttt

SEQ ID NO: 8533 - DNA, 84 bp, Artificial
  Barcode component
  misc_feature (33)..(34): n is a, c, g, or t
  misc_feature (43)..(44): n is a, c, g, or t
  misc_feature (53)..(54): n is a, c, g, or t
tttttttaagcagtggtatcaacgcagagtacnnacgaatccnntacaggtcnntttttttttttttttttttttttttttttt

SEQ ID NO: 8534 - DNA, 84 bp, Artificial
  Barcode component
  misc_feature (33)..(34): n is a, c, g, or t
  misc_feature (43)..(44): n is a, c, g, or t
  misc_feature (53)..(54): n is a, c, g, or t
tttttttaagcagtggtatcaacgcagagtacnnacgaatccnnctcacatgnntttttttttttttttttttttttttttttt

SEQ ID NO: 8535 - DNA, 84 bp, Artificial
  Barcode component
  misc_feature (33)..(34): n is a, c, g, or t
  misc_feature (43)..(44): n is a, c, g, or t
  misc_feature (53)..(54): n is a, c, g, or t
tttttttaagcagtggtatcaacgcagagtacnnacgaatccnnactaggagnntttttttttttttttttttttttttttttt

SEQ ID NO: 8536 - DNA, 84 bp, Artificial
  Barcode component
  misc_feature (33)..(34): n is a, c, g, or t
  misc_feature (43)..(44): n is a, c, g, or t
  misc_feature (53)..(54): n is a, c, g, or t
tttttttaagcagtggtatcaacgcagagtacnnacgaatccnnccatagganntttttttttttttttttttttttttttttt

SEQ ID NO: 8537 - DNA, 84 bp, Artificial
  Barcode component
  misc_feature (33)..(34): n is a, c, g, or t
  misc_feature (43)..(44): n is a, c, g, or t
  misc_feature (53)..(54): n is a, c, g, or t
tttttttaagcagtggtatcaacgcagagtacnnacgaatccnnggagaatcnntttttttttttttttttttttttttttttt

SEQ ID NO: 8538 - DNA, 84 bp, Artificial
  Barcode component
  misc_feature (33)..(34): n is a, c, g, or t
  misc_feature (43)..(44): n is a, c, g, or t
  misc_feature (53)..(54): n is a, c, g, or t
tttttttaagcagtggtatcaacgcagagtacnnacgaatccnngccaagaanntttttttttttttttttttttttttttttt

SEQ ID NO: 8539 - DNA, 84 bp, Artificial
  Barcode component
  misc_feature (33)..(34): n is a, c, g, or t
  misc_feature (43)..(44): n is a, c, g, or t
  misc_feature (53)..(54): n is a, c, g, or t
tttttttaagcagtggtatcaacgcagagtacnnacgaatccnnaaggcaagnntttttttttttttttttttttttttttttt

SEQ ID NO: 8540 - DNA, 84 bp, Artificial
  Barcode component
  misc_feature (33)..(34): n is a, c, g, or t
  misc_feature (43)..(44): n is a, c, g, or t
  misc_feature (53)..(54): n is a, c, g, or t
tttttttaagcagtggtatcaacgcagagtacnnacgaatccnnaatgtcgcnntttttttttttttttttttttttttttttt

SEQ ID NO: 8541 - DNA, 84 bp, Artificial
  Barcode component
  misc_feature (33)..(34): n is a, c, g, or t
  misc_feature (43)..(44): n is a, c, g, or t
  misc_feature (53)..(54): n is a, c, g, or t
tttttttaagcagtggtatcaacgcagagtacnnacgaatccnnatggaaccnntttttttttttttttttttttttttttttt

SEQ ID NO: 8542 - DNA, 84 bp, Artificial
  Barcode component
  misc_feature (33)..(34): n is a, c, g, or t
  misc_feature (43)..(44): n is a, c, g, or t
  misc_feature (53)..(54): n is a, c, g, or t
tttttttaagcagtggtatcaacgcagagtacnnacgaatccnnagaggcatnntttttttttttttttttttttttttttttt

SEQ ID NO: 8543 - DNA, 84 bp, Artificial
  Barcode component
  misc_feature (33)..(34): n is a, c, g, or t
  misc_feature (43)..(44): n is a, c, g, or t
  misc_feature (53)..(54): n is a, c, g, or t
tttttttaagcagtggtatcaacgcagagtacnnacgaatccnntgcatagcnntttttttttttttttttttttttttttttt

SEQ ID NO: 8544 - DNA, 84 bp, Artificial
  Barcode component
  misc_feature (33)..(34): n is a, c, g, or t
  misc_feature (43)..(44): n is a, c, g, or t
  misc_feature (53)..(54): n is a, c, g, or t
tttttttaagcagtggtatcaacgcagagtacnnacgaatccnnctaacgganntttttttttttttttttttttttttttttt

SEQ ID NO: 8545 - DNA, 84 bp, Artificial
  Barcode component
  misc_feature (33)..(34): n is a, c, g, or t
  misc_feature (43)..(44): n is a, c, g, or t
  misc_feature (53)..(54): n is a, c, g, or t
tttttttaagcagtggtatcaacgcagagtacnnacgaatccnntatcgaggnntttttttttttttttttttttttttttttt

SEQ ID NO: 8546 - DNA, 84 bp, Artificial
  Barcode component
  misc_feature (33)..(34): n is a, c, g, or t
  misc_feature (43)..(44): n is a, c, g, or t
  misc_feature (53)..(54): n is a, c, g, or t
tttttttaagcagtggtatcaacgcagagtacnnacgaatccnncatagcctnntttttttttttttttttttttttttttttt

SEQ ID NO: 8547 - DNA, 84 bp, Artificial
  Barcode component
  misc_feature (33)..(34): n is a, c, g, or t
  misc_feature (43)..(44): n is a, c, g, or t
  misc_feature (53)..(54): n is a, c, g, or t
tttttttaagcagtggtatcaacgcagagtacnnacgaatccnnatcgagacnntttttttttttttttttttttttttttttt

SEQ ID NO: 8548 - DNA, 84 bp, Artificial
  Barcode component
  misc_feature (33)..(34): n is a, c, g, or t
  misc_feature (43)..(44): n is a, c, g, or t
  misc_feature (53)..(54): n is a, c, g, or t
tttttttaagcagtggtatcaacgcagagtacnnacgaatccnnggaagagtnntttttttttttttttttttttttttttttt

SEQ ID NO: 8549 - DNA, 84 bp, Artificial
  Barcode component
  misc_feature (33)..(34): n is a, c, g, or t
  misc_feature (43)..(44): n is a, c, g, or t
  misc_feature (53)..(54): n is a, c, g, or t
tttttttaagcagtggtatcaacgcagagtacnnacgaatccnnccaagtagnntttttttttttttttttttttttttttttt

SEQ ID NO: 8550 - DNA, 84 bp, Artificial
  Barcode component
  misc_feature (33)..(34): n is a, c, g, or t
  misc_feature (43)..(44): n is a, c, g, or t
  misc_feature (53)..(54): n is a, c, g, or t
tttttttaagcagtggtatcaacgcagagtacnnacgaatccnnctgaacagnntttttttttttttttttttttttttttttt

SEQ ID NO: 8551 - DNA, 84 bp, Artificial
  Barcode component
  misc_feature (33)..(34): n is a, c, g, or t
  misc_feature (43)..(44): n is a, c, g, or t
  misc_feature (53)..(54): n is a, c, g, or t
tttttttaagcagtggtatcaacgcagagtacnnacgaatccnngtaggttcnntttttttttttttttttttttttttttttt

SEQ ID NO: 8552 - DNA, 84 bp, Artificial
  Barcode component
  misc_feature (33)..(34): n is a, c, g, or t
  misc_feature (43)..(44): n is a, c, g, or t
  misc_feature (53)..(54): n is a, c, g, or t
tttttttaagcagtggtatcaacgcagagtacnnacgaatccnngtatggacnntttttttttttttttttttttttttttttt

SEQ ID NO: 8553 - DNA, 84 bp, Artificial
  Barcode component
  misc_feature (33)..(34): n is a, c, g, or t
  misc_feature (43)..(44): n is a, c, g, or t
  misc_feature (53)..(54): n is a, c, g, or t
tttttttaagcagtggtatcaacgcagagtacnnacgaatccnntcgcaacanntttttttttttttttttttttttttttttt

SEQ ID NO: 8554 - DNA, 84 bp, Artificial
  Barcode component
  misc_feature (33)..(34): n is a, c, g, or t
  misc_feature (43)..(44): n is a, c, g, or t
  misc_feature (53)..(54): n is a, c, g, or t
tttttttaagcagtggtatcaacgcagagtacnnacgaatccnnccgctaatnntttttttttttttttttttttttttttttt

SEQ ID NO: 8555 - DNA, 84 bp, Artificial
  Barcode component
  misc_feature (33)..(34): n is a, c, g, or t
  misc_feature (43)..(44): n is a, c, g, or t
  misc_feature (53)..(54): n is a, c, g, or t
tttttttaagcagtggtatcaacgcagagtacnnacgaatccnngattcgcanntttttttttttttttttttttttttttttt

SEQ ID NO: 8556 - DNA, 84 bp, Artificial
  Barcode component
  misc_feature (33)..(34): n is a, c, g, or t
  misc_feature (43)..(44): n is a, c, g, or t
  misc_feature (53)..(54): n is a, c, g, or t
tttttttaagcagtggtatcaacgcagagtacnnacgaatccnncgatggaanntttttttttttttttttttttttttttttt

SEQ ID NO: 8557 - DNA, 84 bp, Artificial
  Barcode component
  misc_feature (33)..(34): n is a, c, g, or t
  misc_feature (43)..(44): n is a, c, g, or t
  misc_feature (53)..(54): n is a, c, g, or t
tttttttaagcagtggtatcaacgcagagtacnnacgaatccnnagcaagganntttttttttttttttttttttttttttttt

SEQ ID NO: 8558 - DNA, 84 bp, Artificial
  Barcode component
  misc_feature (33)..(34): n is a, c, g, or t
  misc_feature (43)..(44): n is a, c, g, or t
  misc_feature (53)..(54): n is a, c, g, or t
tttttttaagcagtggtatcaacgcagagtacnnacgaatccnncgtagcaanntttttttttttttttttttttttttttttt

SEQ ID NO: 8559 - DNA, 84 bp, Artificial
  Barcode component
  misc_feature (33)..(34): n is a, c, g, or t
  misc_feature (43)..(44): n is a, c, g, or t
  misc_feature (53)..(54): n is a, c, g, or t
tttttttaagcagtggtatcaacgcagagtacnnacgaatccnntggcagtanntttttttttttttttttttttttttttttt

SEQ ID NO: 8560 - DNA, 84 bp, Artificial
  Barcode component
  misc_feature (33)..(34): n is a, c, g, or t
  misc_feature (43)..(44): n is a, c, g, or t
  misc_feature (53)..(54): n is a, c, g, or t
tttttttaagcagtggtatcaacgcagagtacnnacgaatccnncggtagttnntttttttttttttttttttttttttttttt

SEQ ID NO: 8561 - DNA, 84 bp, Artificial
  Barcode component
  misc_feature (33)..(34): n is a, c, g, or t
  misc_feature (43)..(44): n is a, c, g, or t
  misc_feature (53)..(54): n is a, c, g, or t
tttttttaagcagtggtatcaacgcagagtacnnacgaatccnntgacttcgnntttttttttttttttttttttttttttttt

SEQ ID NO: 8562 - DNA, 84 bp, Artificial
  Barcode component
  misc_feature (33)..(34): n is a, c, g, or t
  misc_feature (43)..(44): n is a, c, g, or t
  misc_feature (53)..(54): n is a, c, g, or t
tttttttaagcagtggtatcaacgcagagtacnnacgaatccnngagtgcaanntttttttttttttttttttttttttttttt

SEQ ID NO: 8563 - DNA, 84 bp, Artificial
  Barcode component
  misc_feature (33)..(34): n is a, c, g, or t
  misc_feature (43)..(44): n is a, c, g, or t
  misc_feature (53)..(54): n is a, c, g, or t
tttttttaagcagtggtatcaacgcagagtacnnacgaatccnnacggtaacnntttttttttttttttttttttttttttttt

SEQ ID NO: 8564 - DNA, 84 bp, Artificial
  Barcode component
  misc_feature (33)..(34): n is a, c, g, or t
  misc_feature (43)..(44): n is a, c, g, or t
  misc_feature (53)..(54): n is a, c, g, or t
tttttttaagcagtggtatcaacgcagagtacnnacgaatccnnaagtggtgnntttttttttttttttttttttttttttttt

SEQ ID NO: 8565 - DNA, 84 bp, Artificial
  Barcode component
  misc_feature (33)..(34): n is a, c, g, or t
  misc_feature (43)..(44): n is a, c, g, or t
  misc_feature (53)..(54): n is a, c, g, or t
tttttttaagcagtggtatcaacgcagagtacnnacgaatccnnggagacaanntttttttttttttttttttttttttttttt

SEQ ID NO: 8566 - DNA, 84 bp, Artificial
  Barcode component
  misc_feature (33)..(34): n is a, c, g, or t
  misc_feature (43)..(44): n is a, c, g, or t
  misc_feature (53)..(54): n is a, c, g, or t
tttttttaagcagtggtatcaacgcagagtacnnacgaatccnntcaaggacnntttttttttttttttttttttttttttttt

SEQ ID NO: 8567 - DNA, 84 bp, Artificial
  Barcode component
  misc_feature (33)..(34): n is a, c, g, or t
  misc_feature (43)..(44): n is a, c, g, or t
  misc_feature (53)..(54): n is a, c, g, or t
tttttttaagcagtggtatcaacgcagagtacnnacgaatccnnaagagagcnntttttttttttttttttttttttttttttt

SEQ ID NO: 8568 - DNA, 84 bp, Artificial
  Barcode component
  misc_feature (33)..(34): n is a, c, g, or t
  misc_feature (43)..(44): n is a, c, g, or t
  misc_feature (53)..(54): n is a, c, g, or t
tttttttaagcagtggtatcaacgcagagtacnnacgaatccnncgagagatnntttttttttttttttttttttttttttttt

SEQ ID NO: 8569 - DNA, 84 bp, Artificial
  Barcode component
  misc_feature (33)..(34): n is a, c, g, or t
  misc_feature (43)..(44): n is a, c, g, or t
  misc_feature (53)..(54): n is a, c, g, or t
tttttttaagcagtggtatcaacgcagagtacnnacgaatccnnacagatggnntttttttttttttttttttttttttttttt

SEQ ID NO: 8570 - DNA, 84 bp, Artificial
  Barcode component
  misc_feature (33)..(34): n is a, c, g, or t
  misc_feature (43)..(44): n is a, c, g, or t
  misc_feature (53)..(54): n is a, c, g, or t
tttttttaagcagtggtatcaacgcagagtacnnacgaatccnnaggagtcanntttttttttttttttttttttttttttttt

SEQ ID NO: 8571 - DNA, 84 bp, Artificial
  Barcode component
  misc_feature (33)..(34): n is a, c, g, or t
  misc_feature (43)..(44): n is a, c, g, or t
  misc_feature (53)..(54): n is a, c, g, or t
tttttttaagcagtggtatcaacgcagagtacnnacgaatccnncgtgttacnntttttttttttttttttttttttttttttt

SEQ ID NO: 8572 - DNA, 84 bp, Artificial
  Barcode component
  misc_feature (33)..(34): n is a, c, g, or t
  misc_feature (43)..(44): n is a, c, g, or t
  misc_feature (53)..(54): n is a, c, g, or t
tttttttaagcagtggtatcaacgcagagtacnnacgaatccnntagtgtgcnntttttttttttttttttttttttttttttt

SEQ ID NO: 8573 - DNA, 84 bp, Artificial
  Barcode component
  misc_feature (33)..(34): n is a, c, g, or t
  misc_feature (43)..(44): n is a, c, g, or t
  misc_feature (53)..(54): n is a, c, g, or t
tttttttaagcagtggtatcaacgcagagtacnnacgaatccnnctcatgacnntttttttttttttttttttttttttttttt

SEQ ID NO: 8574 - DNA, 84 bp, Artificial
  Barcode component
  misc_feature (33)..(34): n is a, c, g, or t
  misc_feature (43)..(44): n is a, c, g, or t
  misc_feature (53)..(54): n is a, c, g, or t
tttttttaagcagtggtatcaacgcagagtacnnacgaatccnngtatccagnntttttttttttttttttttttttttttttt

SEQ ID NO: 8575 - DNA, 84 bp, Artificial
  Barcode component
  misc_feature (33)..(34): n is a, c, g, or t
  misc_feature (43)..(44): n is a, c, g, or t
  misc_feature (53)..(54): n is a, c, g, or t
tttttttaagcagtggtatcaacgcagagtacnnacgaatccnnacgcctatnntttttttttttttttttttttttttttttt

SEQ ID NO: 8576 - DNA, 84 bp, Artificial
  Barcode component
  misc_feature (33)..(34): n is a, c, g, or t
  misc_feature (43)..(44): n is a, c, g, or t
  misc_feature (53)..(54): n is a, c, g, or t
tttttttaagcagtggtatcaacgcagagtacnnacgaatccnnaacgacctnntttttttttttttttttttttttttttttt

SEQ ID NO: 8577 - DNA, 84 bp, Artificial
  Barcode component
  misc_feature (33)..(34): n is a, c, g, or t
  misc_feature (43)..(44): n is a, c, g, or t
  misc_feature (53)..(54): n is a, c, g, or t
tttttttaagcagtggtatcaacgcagagtacnnacgaatccnnatcaggctnntttttttttttttttttttttttttttttt

SEQ ID NO: 8578 - DNA, 84 bp, Artificial
  Barcode component
  misc_feature (33)..(34): n is a, c, g, or t
  misc_feature (43)..(44): n is a, c, g, or t
  misc_feature (53)..(54): n is a, c, g, or t
tttttttaagcagtggtatcaacgcagagtacnnacgaatccnncaagttcgnntttttttttttttttttttttttttttttt

SEQ ID NO: 8579 - DNA, 84 bp, Artificial
  Barcode component
  misc_feature (33)..(34): n is a, c, g, or t
  misc_feature (43)..(44): n is a, c, g, or t
  misc_feature (53)..(54): n is a, c, g, or t
tttttttaagcagtggtatcaacgcagagtacnnacgaatccnntagccaganntttttttttttttttttttttttttttttt

SEQ ID NO: 8580 - DNA, 84 bp, Artificial
  Barcode component
  misc_feature (33)..(34): n is a, c, g, or t
  misc_feature (43)..(44): n is a, c, g, or t
  misc_feature (53)..(54): n is a, c, g, or t
tttttttaagcagtggtatcaacgcagagtacnnacgaatccnncaatcacgnntttttttttttttttttttttttttttttt

SEQ ID NO: 8581 - DNA, 84 bp, Artificial
  Barcode component
  misc_feature (33)..(34): n is a, c, g, or t
  misc_feature (43)..(44): n is a, c, g, or t
  misc_feature (53)..(54): n is a, c, g, or t
tttttttaagcagtggtatcaacgcagagtacnnacgaatccnngcaacaagnntttttttttttttttttttttttttttttt

SEQ ID NO: 8582 - DNA, 84 bp, Artificial
  Barcode component
  misc_feature (33)..(34): n is a, c, g, or t
  misc_feature (43)..(44): n is a, c, g, or t
  misc_feature (53)..(54): n is a, c, g, or t
tttttttaagcagtggtatcaacgcagagtacnnacgaatccnncacgacaanntttttttttttttttttttttttttttttt

SEQ ID NO: 8583 - DNA, 84 bp, Artificial
  Barcode component
  misc_feature (33)..(34): n is a, c, g, or t
  misc_feature (43)..(44): n is a, c, g, or t
  misc_feature (53)..(54): n is a, c, g, or t
tttttttaagcagtggtatcaacgcagagtacnnacgaatccnntacggaganntttttttttttttttttttttttttttttt

SEQ ID NO: 8584 - DNA, 84 bp, Artificial
  Barcode component
  misc_feature (33)..(34): n is a, c, g, or t
  misc_feature (43)..(44): n is a, c, g, or t
  misc_feature (53)..(54): n is a, c, g, or t
tttttttaagcagtggtatcaacgcagagtacnnacgaatccnncgacaaganntttttttttttttttttttttttttttttt

SEQ ID NO: 8585 - DNA, 84 bp, Artificial
  Barcode component
  misc_feature (33)..(34): n is a, c, g, or t
  misc_feature (43)..(44): n is a, c, g, or t
  misc_feature (53)..(54): n is a, c, g, or t
tttttttaagcagtggtatcaacgcagagtacnnacgaatccnncgaagtganntttttttttttttttttttttttttttttt

SEQ ID NO: 8586 - DNA, 84 bp, Artificial
  Barcode component
  misc_feature (33)..(34): n is a, c, g, or t
  misc_feature (43)..(44): n is a, c, g, or t
  misc_feature (53)..(54): n is a, c, g, or t
tttttttaagcagtggtatcaacgcagagtacnnacgaatccnnagctggtanntttttttttttttttttttttttttttttt

SEQ ID NO: 8587 - DNA, 84 bp, Artificial
  Barcode component
  misc_feature (33)..(34): n is a, c, g, or t
  misc_feature (43)..(44): n is a, c, g, or t
  misc_feature (53)..(54): n is a, c, g, or t
tttttttaagcagtggtatcaacgcagagtacnnacgaatccnnaactaggcnntttttttttttttttttttttttttttttt

SEQ ID NO: 8588 - DNA, 84 bp, Artificial
  Barcode component
  misc_feature (33)..(34): n is a, c, g, or t
  misc_feature (43)..(44): n is a, c, g, or t
  misc_feature (53)..(54): n is a, c, g, or t
tttttttaagcagtggtatcaacgcagagtacnnacgaatccnncagcaagtnntttttttttttttttttttttttttttttt

SEQ ID NO: 8589 - DNA, 84 bp, Artificial
  Barcode component
  misc_feature (33)..(34): n is a, c, g, or t
  misc_feature (43)..(44): n is a, c, g, or t
  misc_feature (53)..(54): n is a, c, g, or t
tttttttaagcagtggtatcaacgcagagtacnnacgaatccnnacgaggtanntttttttttttttttttttttttttttttt

SEQ ID NO: 8590 - DNA, 84 bp, Artificial
  Barcode component
  misc_feature (33)..(34): n is a, c, g, or t
  misc_feature (43)..(44): n is a, c, g, or t
  misc_feature (53)..(54): n is a, c, g, or t
tttttttaagcagtggtatcaacgcagagtacnnacgaatccnncatcttccnntttttttttttttttttttttttttttttt

SEQ ID NO: 8591 - DNA, 84 bp, Artificial
  Barcode component
  misc_feature (33)..(34): n is a, c, g, or t
  misc_feature (43)..(44): n is a, c, g, or t
  misc_feature (53)..(54): n is a, c, g, or t
tttttttaagcagtggtatcaacgcagagtacnnacgaatccnncctgaatcnntttttttttttttttttttttttttttttt

SEQ ID NO: 8592 - DNA, 84 bp, Artificial
  Barcode component
  misc_feature (33)..(34): n is a, c, g, or t
  misc_feature (43)..(44): n is a, c, g, or t
  misc_feature (53)..(54): n is a, c, g, or t
tttttttaagcagtggtatcaacgcagagtacnnacgaatccnntgcagactnntttttttttttttttttttttttttttttt

SEQ ID NO: 8593 - DNA, 84 bp, Artificial
  Barcode component
  misc_feature (33)..(34): n is a, c, g, or t
  misc_feature (43)..(44): n is a, c, g, or t
  misc_feature (53)..(54): n is a, c, g, or t
tttttttaagcagtggtatcaacgcagagtacnnacgaatccnnagatgtggnntttttttttttttttttttttttttttttt

SEQ ID NO: 8594 - DNA, 84 bp, Artificial
  Barcode component
  misc_feature (33)..(34): n is a, c, g, or t
  misc_feature (43)..(44): n is a, c, g, or t
  misc_feature (53)..(54): n is a, c, g, or t
tttttttaagcagtggtatcaacgcagagtacnnacgaatccnnagttcgacnntttttttttttttttttttttttttttttt

SEQ ID NO: 8595 - DNA, 84 bp, Artificial
  Barcode component
  misc_feature (33)..(34): n is a, c, g, or t
  misc_feature (43)..(44): n is a, c, g, or t
  misc_feature (53)..(54): n is a, c, g, or t
tttttttaagcagtggtatcaacgcagagtacnnacgaatccnnacaacctcnntttttttttttttttttttttttttttttt

SEQ ID NO: 8596 - DNA, 84 bp, Artificial
  Barcode component
  misc_feature (33)..(34): n is a, c, g, or t
  misc_feature (43)..(44): n is a, c, g, or t
  misc_feature (53)..(54): n is a, c, g, or t
tttttttaagcagtggtatcaacgcagagtacnnacgaatccnncatggtagnntttttttttttttttttttttttttttttt

SEQ ID NO: 8597 - DNA, 84 bp, Artificial
  Barcode component
  misc_feature (33)..(34): n is a, c, g, or t
  misc_feature (43)..(44): n is a, c, g, or t
  misc_feature (53)..(54): n is a, c, g, or t
tttttttaagcagtggtatcaacgcagagtacnnacgaatccnncgtatctcnntttttttttttttttttttttttttttttt

SEQ ID NO: 8598 - DNA, 84 bp, Artificial
  Barcode component
  misc_feature (33)..(34): n is a, c, g, or t
  misc_feature (43)..(44): n is a, c, g, or t
  misc_feature (53)..(54): n is a, c, g, or t
tttttttaagcagtggtatcaacgcagagtacnnacgaatccnncctagttcnntttttttttttttttttttttttttttttt

SEQ ID NO: 8599 - DNA, 84 bp, Artificial
  Barcode component
  misc_feature (33)..(34): n is a, c, g, or t
  misc_feature (43)..(44): n is a, c, g, or t
  misc_feature (53)..(54): n is a, c, g, or t
tttttttaagcagtggtatcaacgcagagtacnnacgaatccnncaagagtcnntttttttttttttttttttttttttttttt

SEQ ID NO: 8600 - DNA, 84 bp, Artificial
  Barcode component
  misc_feature (33)..(34): n is a, c, g, or t
  misc_feature (43)..(44): n is a, c, g, or t
  misc_feature (53)..(54): n is a, c, g, or t
tttttttaagcagtggtatcaacgcagagtacnntaagaccgnnaatcggcanntttttttttttttttttttttttttttttt

SEQ ID NO: 8601 - DNA, 84 bp, Artificial
  Barcode component
  misc_feature (33)..(34): n is a, c, g, or t
  misc_feature (43)..(44): n is a, c, g, or t
  misc_feature (53)..(54): n is a, c, g, or t
tttttttaagcagtggtatcaacgcagagtacnntaagaccgnntacggcatnntttttttttttttttttttttttttttttt

SEQ ID NO: 8602 - DNA, 84 bp, Artificial
  Barcode component
  misc_feature (33)..(34): n is a, c, g, or t
  misc_feature (43)..(44): n is a, c, g, or t
  misc_feature (53)..(54): n is a, c, g, or t
tttttttaagcagtggtatcaacgcagagtacnntaagaccgnnttggatcgnntttttttttttttttttttttttttttttt

SEQ ID NO: 8603 - DNA, 84 bp, Artificial
  Barcode component
  misc_feature (33)..(34): n is a, c, g, or t
  misc_feature (43)..(44): n is a, c, g, or t
  misc_feature (53)..(54): n is a, c, g, or t
tttttttaagcagtggtatcaacgcagagtacnntaagaccgnntggaacganntttttttttttttttttttttttttttttt

SEQ ID NO: 8604 - DNA, 84 bp, Artificial
  Barcode component
  misc_feature (33)..(34): n is a, c, g, or t
  misc_feature (43)..(44): n is a, c, g, or t
  misc_feature (53)..(54): n is a, c, g, or t
tttttttaagcagtggtatcaacgcagagtacnntaagaccgnnggcaatcanntttttttttttttttttttttttttttttt

SEQ ID NO: 8605 - DNA, 84 bp, Artificial
  Barcode component
  misc_feature (33)..(34): n is a, c, g, or t
  misc_feature (43)..(44): n is a, c, g, or t
  misc_feature (53)..(54): n is a, c, g, or t
tttttttaagcagtggtatcaacgcagagtacnntaagaccgnngaatccganntttttttttttttttttttttttttttttt

SEQ ID NO: 8606 - DNA, 84 bp, Artificial
  Barcode component
  misc_feature (33)..(34): n is a, c, g, or t
  misc_feature (43)..(44): n is a, c, g, or t
  misc_feature (53)..(54): n is a, c, g, or t
tttttttaagcagtggtatcaacgcagagtacnntaagaccgnnttacggtgnntttttttttttttttttttttttttttttt

SEQ ID NO: 8607 - DNA, 84 bp, Artificial
  Barcode component
  misc_feature (33)..(34): n is a, c, g, or t
  misc_feature (43)..(44): n is a, c, g, or t
  misc_feature (53)..(54): n is a, c, g, or t
tttttttaagcagtggtatcaacgcagagtacnntaagaccgnncatatcggnntttttttttttttttttttttttttttttt

SEQ ID NO: 8608 - DNA, 84 bp, Artificial
  Barcode component
  misc_feature (33)..(34): n is a, c, g, or t
  misc_feature (43)..(44): n is a, c, g, or t
  misc_feature (53)..(54): n is a, c, g, or t
tttttttaagcagtggtatcaacgcagagtacnntaagaccgnncttcggtanntttttttttttttttttttttttttttttt

SEQ ID NO: 8609 - DNA, 84 bp, Artificial
  Barcode component
  misc_feature (33)..(34): n is a, c, g, or t
  misc_feature (43)..(44): n is a, c, g, or t
  misc_feature (53)..(54): n is a, c, g, or t
tttttttaagcagtggtatcaacgcagagtacnntaagaccgnntcctaacgnntttttttttttttttttttttttttttttt

SEQ ID NO: 8610 - DNA, 84 bp, Artificial
  Barcode component
  misc_feature (33)..(34): n is a, c, g, or t
  misc_feature (43)..(44): n is a, c, g, or t
  misc_feature (53)..(54): n is a, c, g, or t
tttttttaagcagtggtatcaacgcagagtacnntaagaccgnngtaagccanntttttttttttttttttttttttttttttt

SEQ ID NO: 8611 - DNA, 84 bp, Artificial
  Barcode component
  misc_feature (33)..(34): n is a, c, g, or t
  misc_feature (43)..(44): n is a, c, g, or t
  misc_feature (53)..(54): n is a, c, g, or t
tttttttaagcagtggtatcaacgcagagtacnntaagaccgnntaaggtggnntttttttttttttttttttttttttttttt

SEQ ID NO: 8612 - DNA, 84 bp, Artificial
  Barcode component
  misc_feature (33)..(34): n is a, c, g, or t
  misc_feature (43)..(44): n is a, c, g, or t
  misc_feature (53)..(54): n is a, c, g, or t
tttttttaagcagtggtatcaacgcagagtacnntaagaccgnnggtaagctnntttttttttttttttttttttttttttttt

SEQ ID NO: 8613 - DNA, 84 bp, Artificial
  Barcode component
  misc_feature (33)..(34): n is a, c, g, or t
  misc_feature (43)..(44): n is a, c, g, or t
  misc_feature (53)..(54): n is a, c, g, or t
tttttttaagcagtggtatcaacgcagagtacnntaagaccgnntgtgtcganntttttttttttttttttttttttttttttt

SEQ ID NO: 8614 - DNA, 84 bp, Artificial
  Barcode component
  misc_feature (33)..(34): n is a, c, g, or t
  misc_feature (43)..(44): n is a, c, g, or t
  misc_feature (53)..(54): n is a, c, g, or t
tttttttaagcagtggtatcaacgcagagtacnntaagaccgnngagcatganntttttttttttttttttttttttttttttt

SEQ ID NO: 8615 - DNA, 84 bp, Artificial
  Barcode component
  misc_feature (33)..(34): n is a, c, g, or t
  misc_feature (43)..(44): n is a, c, g, or t
  misc_feature (53)..(54): n is a, c, g, or t
tttttttaagcagtggtatcaacgcagagtacnntaagaccgnntcgaagtcnntttttttttttttttttttttttttttttt

SEQ ID NO: 8616 - DNA, 84 bp, Artificial
  Barcode component
  misc_feature (33)..(34): n is a, c, g, or t
  misc_feature (43)..(44): n is a, c, g, or t
  misc_feature (53)..(54): n is a, c, g, or t
tttttttaagcagtggtatcaacgcagagtacnntaagaccgnnggtgaacanntttttttttttttttttttttttttttttt

SEQ ID NO: 8617 - DNA, 84 bp, Artificial
  Barcode component
  misc_feature (33)..(34): n is a, c, g, or t
  misc_feature (43)..(44): n is a, c, g, or t
  misc_feature (53)..(54): n is a, c, g, or t
tttttttaagcagtggtatcaacgcagagtacnntaagaccgnnacatgcacnntttttttttttttttttttttttttttttt

SEQ ID NO: 8618 - DNA, 84 bp, Artificial
  Barcode component
  misc_feature (33)..(34): n is a, c, g, or t
  misc_feature (43)..(44): n is a, c, g, or t
  misc_feature (53)..(54): n is a, c, g, or t
tttttttaagcagtggtatcaacgcagagtacnntaagaccgnnccaacagtnntttttttttttttttttttttttttttttt

SEQ ID NO: 8619 - DNA, 84 bp, Artificial
  Barcode component
  misc_feature (33)..(34): n is a, c, g, or t
  misc_feature (43)..(44): n is a, c, g, or t
  misc_feature (53)..(54): n is a, c, g, or t
tttttttaagcagtggtatcaacgcagagtacnntaagaccgnnagaacagcnntttttttttttttttttttttttttttttt

SEQ ID NO: 8620 - DNA, 84 bp, Artificial
  Barcode component
  misc_feature (33)..(34): n is a, c, g, or t
  misc_feature (43)..(44): n is a, c, g, or t
  misc_feature (53)..(54): n is a, c, g, or t
tttttttaagcagtggtatcaacgcagagtacnntaagaccgnngaacacgtnntttttttttttttttttttttttttttttt

SEQ ID NO: 8621 - DNA, 84 bp, Artificial
  Barcode component
  misc_feature (33)..(34): n is a, c, g, or t
  misc_feature (43)..(44): n is a, c, g, or t
  misc_feature (53)..(54): n is a, c, g, or t
tttttttaagcagtggtatcaacgcagagtacnntaagaccgnnggtcttcanntttttttttttttttttttttttttttttt

SEQ ID NO: 8622 - DNA, 84 bp, Artificial
  Barcode component
  misc_feature (33)..(34): n is a, c, g, or t
  misc_feature (43)..(44): n is a, c, g, or t
  misc_feature (53)..(54): n is a, c, g, or t
tttttttaagcagtggtatcaacgcagagtacnntaagaccgnnaggttcagnntttttttttttttttttttttttttttttt

SEQ ID NO: 8623 - DNA, 84 bp, Artificial
  Barcode component
  misc_feature (33)..(34): n is a, c, g, or t
  misc_feature (43)..(44): n is a, c, g, or t
  misc_feature (53)..(54): n is a, c, g, or t
tttttttaagcagtggtatcaacgcagagtacnntaagaccgnnctagagcanntttttttttttttttttttttttttttttt

SEQ ID NO: 8624 - DNA, 84 bp, Artificial
  Barcode component
  misc_feature (33)..(34): n is a, c, g, or t
  misc_feature (43)..(44): n is a, c, g, or t
  misc_feature (53)..(54): n is a, c, g, or t
tttttttaagcagtggtatcaacgcagagtacnntaagaccgnncttctagcnntttttttttttttttttttttttttttttt

SEQ ID NO: 8625 - DNA, 84 bp, Artificial
  Barcode component
  misc_feature (33)..(34): n is a, c, g, or t
  misc_feature (43)..(44): n is a, c, g, or t
  misc_feature (53)..(54): n is a, c, g, or t
tttttttaagcagtggtatcaacgcagagtacnntaagaccgnngagtaacgnntttttttttttttttttttttttttttttt

SEQ ID NO: 8626 - DNA, 84 bp, Artificial
  Barcode component
  misc_feature (33)..(34): n is a, c, g, or t
  misc_feature (43)..(44): n is a, c, g, or t
  misc_feature (53)..(54): n is a, c, g, or t
tttttttaagcagtggtatcaacgcagagtacnntaagaccgnnctaagaggnntttttttttttttttttttttttttttttt

SEQ ID NO: 8627 - DNA, 84 bp, Artificial
  Barcode component
  misc_feature (33)..(34): n is a, c, g, or t
  misc_feature (43)..(44): n is a, c, g, or t
  misc_feature (53)..(54): n is a, c, g, or t
tttttttaagcagtggtatcaacgcagagtacnntaagaccgnnacgtgtagnntttttttttttttttttttttttttttttt

SEQ ID NO: 8628 - DNA, 84 bp, Artificial
  Barcode component
  misc_feature (33)..(34): n is a, c, g, or t
  misc_feature (43)..(44): n is a, c, g, or t
  misc_feature (53)..(54): n is a, c, g, or t
tttttttaagcagtggtatcaacgcagagtacnntaagaccgnnactacaggnntttttttttttttttttttttttttttttt

SEQ ID NO: 8629 - DNA, 84 bp, Artificial
  Barcode component
  misc_feature (33)..(34): n is a, c, g, or t
  misc_feature (43)..(44): n is a, c, g, or t
  misc_feature (53)..(54): n is a, c, g, or t
tttttttaagcagtggtatcaacgcagagtacnntaagaccgnntacaggtcnntttttttttttttttttttttttttttttt

SEQ ID NO: 8630 - DNA, 84 bp, Artificial
  Barcode component
  misc_feature (33)..(34): n is a, c, g, or t
  misc_feature (43)..(44): n is a, c, g, or t
  misc_feature (53)..(54): n is a, c, g, or t
tttttttaagcagtggtatcaacgcagagtacnntaagaccgnnctcacatgnntttttttttttttttttttttttttttttt

SEQ ID NO: 8631 - DNA, 84 bp, Artificial
  Barcode component
  misc_feature (33)..(34): n is a, c, g, or t
  misc_feature (43)..(44): n is a, c, g, or t
  misc_feature (53)..(54): n is a, c, g, or t
tttttttaagcagtggtatcaacgcagagtacnntaagaccgnnactaggagnntttttttttttttttttttttttttttttt

SEQ ID NO: 8632 - DNA, 84 bp, Artificial
  Barcode component
  misc_feature (33)..(34): n is a, c, g, or t
  misc_feature (43)..(44): n is a, c, g, or t
  misc_feature (53)..(54): n is a, c, g, or t
tttttttaagcagtggtatcaacgcagagtacnntaagaccgnnccatagganntttttttttttttttttttttttttttttt

SEQ ID NO: 8633 - DNA, 84 bp, Artificial
  Barcode component
  misc_feature (33)..(34): n is a, c, g, or t
  misc_feature (43)..(44): n is a, c, g, or t
  misc_feature (53)..(54): n is a, c, g, or t
tttttttaagcagtggtatcaacgcagagtacnntaagaccgnnggagaatcnntttttttttttttttttttttttttttttt

SEQ ID NO: 8634 - DNA, 84 bp, Artificial
  Barcode component
  misc_feature (33)..(34): n is a, c, g, or t
  misc_feature (43)..(44): n is a, c, g, or t
  misc_feature (53)..(54): n is a, c, g, or t
tttttttaagcagtggtatcaacgcagagtacnntaagaccgnngccaagaanntttttttttttttttttttttttttttttt

SEQ ID NO: 8635 - DNA, 84 bp, Artificial
  Barcode component
  misc_feature (33)..(34): n is a, c, g, or t
  misc_feature (43)..(44): n is a, c, g, or t
  misc_feature (53)..(54): n is a, c, g, or t
tttttttaagcagtggtatcaacgcagagtacnntaagaccgnnaaggcaagnntttttttttttttttttttttttttttttt

SEQ ID NO: 8636 - DNA, 84 bp, Artificial
  Barcode component
  misc_feature (33)..(34): n is a, c, g, or t
  misc_feature (43)..(44): n is a, c, g, or t
  misc_feature (53)..(54): n is a, c, g, or t
tttttttaagcagtggtatcaacgcagagtacnntaagaccgnnaatgtcgcnntttttttttttttttttttttttttttttt

SEQ ID NO: 8637 - DNA, 84 bp, Artificial
  Barcode component
  misc_feature (33)..(34): n is a, c, g, or t
  misc_feature (43)..(44): n is a, c, g, or t
  misc_feature (53)..(54): n is a, c, g, or t
tttttttaagcagtggtatcaacgcagagtacnntaagaccgnnatggaaccnntttttttttttttttttttttttttttttt

SEQ ID NO: 8638 - DNA, 84 bp, Artificial
  Barcode component
  misc_feature (33)..(34): n is a, c, g, or t
  misc_feature (43)..(44): n is a, c, g, or t
  misc_feature (53)..(54): n is a, c, g, or t
tttttttaagcagtggtatcaacgcagagtacnntaagaccgnnagaggcatnntttttttttttttttttttttttttttttt

SEQ ID NO: 8639 - DNA, 84 bp, Artificial
  Barcode component
  misc_feature (33)..(34): n is a, c, g, or t
  misc_feature (43)..(44): n is a, c, g, or t
  misc_feature (53)..(54): n is a, c, g, or t
tttttttaagcagtggtatcaacgcagagtacnntaagaccgnntgcatagcnntttttttttttttttttttttttttttttt

SEQ ID NO: 8640 - DNA, 84 bp, Artificial
  Barcode component
  misc_feature (33)..(34): n is a, c, g, or t
  misc_feature (43)..(44): n is a, c, g, or t
  misc_feature (53)..(54): n is a, c, g, or t
tttttttaagcagtggtatcaacgcagagtacnntaagaccgnnctaacgganntttttttttttttttttttttttttttttt

SEQ ID NO: 8641 - DNA, 84 bp, Artificial
  Barcode component
  misc_feature (33)..(34): n is a, c, g, or t
  misc_feature (43)..(44): n is a, c, g, or t
  misc_feature (53)..(54): n is a, c, g, or t
tttttttaagcagtggtatcaacgcagagtacnntaagaccgnntatcgaggnntttttttttttttttttttttttttttttt

SEQ ID NO: 8642 - DNA, 84 bp, Artificial
  Barcode component
  misc_feature (33)..(34): n is a, c, g, or t
  misc_feature (43)..(44): n is a, c, g, or t
  misc_feature (53)..(54): n is a, c, g, or t
tttttttaagcagtggtatcaacgcagagtacnntaagaccgnncatagcctnntttttttttttttttttttttttttttttt

SEQ ID NO: 8643 - DNA, 84 bp, Artificial
  Barcode component
  misc_feature (33)..(34): n is a, c, g, or t
  misc_feature (43)..(44): n is a, c, g, or t
  misc_feature (53)..(54): n is a, c, g, or t
tttttttaagcagtggtatcaacgcagagtacnntaagaccgnnatcgagacnntttttttttttttttttttttttttttttt

SEQ ID NO: 8644 - DNA, 84 bp, Artificial
  Barcode component
  misc_feature (33)..(34): n is a, c, g, or t
  misc_feature (43)..(44): n is a, c, g, or t
  misc_feature (53)..(54): n is a, c, g, or t
tttttttaagcagtggtatcaacgcagagtacnntaagaccgnnggaagagtnntttttttttttttttttttttttttttttt

SEQ ID NO: 8645 - DNA, 84 bp, Artificial
  Barcode component
  misc_feature (33)..(34): n is a, c, g, or t
  misc_feature (43)..(44): n is a, c, g, or t
  misc_feature (53)..(54): n is a, c, g, or t
tttttttaagcagtggtatcaacgcagagtacnntaagaccgnnccaagtagnntttttttttttttttttttttttttttttt

SEQ ID NO: 8646 - DNA, 84 bp, Artificial
  Barcode component
  misc_feature (33)..(34): n is a, c, g, or t
  misc_feature (43)..(44): n is a, c, g, or t
  misc_feature (53)..(54): n is a, c, g, or t
tttttttaagcagtggtatcaacgcagagtacnntaagaccgnnctgaacagnntttttttttttttttttttttttttttttt

SEQ ID NO: 8647 - DNA, 84 bp, Artificial
  Barcode component
  misc_feature (33)..(34): n is a, c, g, or t
  misc_feature (43)..(44): n is a, c, g, or t
  misc_feature (53)..(54): n is a, c, g, or t
tttttttaagcagtggtatcaacgcagagtacnntaagaccgnngtaggttcnntttttttttttttttttttttttttttttt

SEQ ID NO: 8648 - DNA, 84 bp, Artificial
  Barcode component
  misc_feature (33)..(34): n is a, c, g, or t
  misc_feature (43)..(44): n is a, c, g, or t
  misc_feature (53)..(54): n is a, c, g, or t
tttttttaagcagtggtatcaacgcagagtacnntaagaccgnngtatggacnntttttttttttttttttttttttttttttt

SEQ ID NO: 8649 - DNA, 84 bp, Artificial
  Barcode component
  misc_feature (33)..(34): n is a, c, g, or t
  misc_feature (43)..(44): n is a, c, g, or t
  misc_feature (53)..(54): n is a, c, g, or t
tttttttaagcagtggtatcaacgcagagtacnntaagaccgnntcgcaacanntttttttttttttttttttttttttttttt

SEQ ID NO: 8650 - DNA, 84 bp, Artificial
  Barcode component
  misc_feature (33)..(34): n is a, c, g, or t
  misc_feature (43)..(44): n is a, c, g, or t
  misc_feature (53)..(54): n is a, c, g, or t
tttttttaagcagtggtatcaacgcagagtacnntaagaccgnnccgctaatnntttttttttttttttttttttttttttttt

SEQ ID NO: 8651 - DNA, 84 bp, Artificial
  Barcode component
  misc_feature (33)..(34): n is a, c, g, or t
  misc_feature (43)..(44): n is a, c, g, or t
  misc_feature (53)..(54): n is a, c, g, or t
tttttttaagcagtggtatcaacgcagagtacnntaagaccgnngattcgcanntttttttttttttttttttttttttttttt

SEQ ID NO: 8652 - DNA, 84 bp, Artificial
  Barcode component
  misc_feature (33)..(34): n is a, c, g, or t
  misc_feature (43)..(44): n is a, c, g, or t
  misc_feature (53)..(54): n is a, c, g, or t
tttttttaagcagtggtatcaacgcagagtacnntaagaccgnncgatggaanntttttttttttttttttttttttttttttt

SEQ ID NO: 8653 - DNA, 84 bp, Artificial
  Barcode component
  misc_feature (33)..(34): n is a, c, g, or t
  misc_feature (43)..(44): n is a, c, g, or t
  misc_feature (53)..(54): n is a, c, g, or t
tttttttaagcagtggtatcaacgcagagtacnntaagaccgnnagcaagganntttttttttttttttttttttttttttttt

SEQ ID NO: 8654 - DNA, 84 bp, Artificial
  Barcode component
  misc_feature (33)..(34): n is a, c, g, or t
  misc_feature (43)..(44): n is a, c, g, or t
  misc_feature (53)..(54): n is a, c, g, or t
tttttttaagcagtggtatcaacgcagagtacnntaagaccgnncgtagcaanntttttttttttttttttttttttttttttt

SEQ ID NO: 8655 - DNA, 84 bp, Artificial
  Barcode component
  misc_feature (33)..(34): n is a, c, g, or t
  misc_feature (43)..(44): n is a, c, g, or t
  misc_feature (53)..(54): n is a, c, g, or t
tttttttaagcagtggtatcaacgcagagtacnntaagaccgnntggcagtanntttttttttttttttttttttttttttttt

SEQ ID NO: 8656 - DNA, 84 bp, Artificial
  Barcode component
  misc_feature (33)..(34): n is a, c, g, or t
  misc_feature (43)..(44): n is a, c, g, or t
  misc_feature (53)..(54): n is a, c, g, or t
tttttttaagcagtggtatcaacgcagagtacnntaagaccgnncggtagttnntttttttttttttttttttttttttttttt

SEQ ID NO: 8657 - DNA, 84 bp, Artificial
  Barcode component
  misc_feature (33)..(34): n is a, c, g, or t
  misc_feature (43)..(44): n is a, c, g, or t
  misc_feature (53)..(54): n is a, c, g, or t
tttttttaagcagtggtatcaacgcagagtacnntaagaccgnntgacttcgnntttttttttttttttttttttttttttttt

SEQ ID NO: 8658 - DNA, 84 bp, Artificial
  Barcode component
  misc_feature (33)..(34): n is a, c, g, or t
  misc_feature (43)..(44): n is a, c, g, or t
  misc_feature (53)..(54): n is a, c, g, or t
tttttttaagcagtggtatcaacgcagagtacnntaagaccgnngagtgcaanntttttttttttttttttttttttttttttt

SEQ ID NO: 8659 - DNA, 84 bp, Artificial
  Barcode component
  misc_feature (33)..(34): n is a, c, g, or t
  misc_feature (43)..(44): n is a, c, g, or t
  misc_feature (53)..(54): n is a, c, g, or t
tttttttaagcagtggtatcaacgcagagtacnntaagaccgnnacggtaacnntttttttttttttttttttttttttttttt

SEQ ID NO: 8660 - DNA, 84 bp, Artificial
  Barcode component
  misc_feature (33)..(34): n is a, c, g, or t
  misc_feature (43)..(44): n is a, c, g, or t
  misc_feature (53)..(54): n is a, c, g, or t
tttttttaagcagtggtatcaacgcagagtacnntaagaccgnnaagtggtgnntttttttttttttttttttttttttttttt

SEQ ID NO: 8661 - DNA, 84 bp, Artificial
  Barcode component
  misc_feature (33)..(34): n is a, c, g, or t
  misc_feature (43)..(44): n is a, c, g, or t
  misc_feature (53)..(54): n is a, c, g, or t
tttttttaagcagtggtatcaacgcagagtacnntaagaccgnnggagacaanntttttttttttttttttttttttttttttt

SEQ ID NO: 8662 - DNA, 84 bp, Artificial
  Barcode component
  misc_feature (33)..(34): n is a, c, g, or t
  misc_feature (43)..(44): n is a, c, g, or t
  misc_feature (53)..(54): n is a, c, g, or t
tttttttaagcagtggtatcaacgcagagtacnntaagaccgnntcaaggacnntttttttttttttttttttttttttttttt

SEQ ID NO: 8663 - DNA, 84 bp, Artificial
  Barcode component
  misc_feature (33)..(34): n is a, c, g, or t
  misc_feature (43)..(44): n is a, c, g, or t
  misc_feature (53)..(54): n is a, c, g, or t
tttttttaagcagtggtatcaacgcagagtacnntaagaccgnnaagagagcnntttttttttttttttttttttttttttttt

SEQ ID NO: 8664 - DNA, 84 bp, Artificial
  Barcode component
  misc_feature (33)..(34): n is a, c, g, or t
  misc_feature (43)..(44): n is a, c, g, or t
  misc_feature (53)..(54): n is a, c, g, or t
tttttttaagcagtggtatcaacgcagagtacnntaagaccgnncgagagatnntttttttttttttttttttttttttttttt

SEQ ID NO: 8665 - DNA, 84 bp, Artificial
  Barcode component
  misc_feature (33)..(34): n is a, c, g, or t
  misc_feature (43)..(44): n is a, c, g, or t
  misc_feature (53)..(54): n is a, c, g, or t
tttttttaagcagtggtatcaacgcagagtacnntaagaccgnnacagatggnntttttttttttttttttttttttttttttt

SEQ ID NO: 8666 - DNA, 84 bp, Artificial
  Barcode component
  misc_feature (33)..(34): n is a, c, g, or t
  misc_feature (43)..(44): n is a, c, g, or t
  misc_feature (53)..(54): n is a, c, g, or t
tttttttaagcagtggtatcaacgcagagtacnntaagaccgnnaggagtcanntttttttttttttttttttttttttttttt

SEQ ID NO: 8667 - DNA, 84 bp, Artificial
  Barcode component
  misc_feature (33)..(34): n is a, c, g, or t
  misc_feature (43)..(44): n is a, c, g, or t
  misc_feature (53)..(54): n is a, c, g, or t
tttttttaagcagtggtatcaacgcagagtacnntaagaccgnncgtgttacnntttttttttttttttttttttttttttttt

SEQ ID NO: 8668 - DNA, 84 bp, Artificial
  Barcode component
  misc_feature (33)..(34): n is a, c, g, or t
  misc_feature (43)..(44): n is a, c, g, or t
  misc_feature (53)..(54): n is a, c, g, or t
tttttttaagcagtggtatcaacgcagagtacnntaagaccgnntagtgtgcnntttttttttttttttttttttttttttttt

SEQ ID NO: 8669 - DNA, 84 bp, Artificial
  Barcode component
  misc_feature (33)..(34): n is a, c, g, or t
  misc_feature (43)..(44): n is a, c, g, or t
  misc_feature (53)..(54): n is a, c, g, or t
tttttttaagcagtggtatcaacgcagagtacnntaagaccgnnctcatgacnntttttttttttttttttttttttttttttt

SEQ ID NO: 8670 - DNA, 84 bp, Artificial
  Barcode component
  misc_feature (33)..(34): n is a, c, g, or t
  misc_feature (43)..(44): n is a, c, g, or t
  misc_feature (53)..(54): n is a, c, g, or t
tttttttaagcagtggtatcaacgcagagtacnntaagaccgnngtatccagnntttttttttttttttttttttttttttttt

SEQ ID NO: 8671 - DNA, 84 bp, Artificial
  Barcode component
  misc_feature (33)..(34): n is a, c, g, or t
  misc_feature (43)..(44): n is a, c, g, or t
  misc_feature (53)..(54): n is a, c, g, or t
tttttttaagcagtggtatcaacgcagagtacnntaagaccgnnacgcctatnntttttttttttttttttttttttttttttt

SEQ ID NO: 8672 - DNA, 84 bp, Artificial
  Barcode component
  misc_feature (33)..(34): n is a, c, g, or t
  misc_feature (43)..(44): n is a, c, g, or t
  misc_feature (53)..(54): n is a, c, g, or t
tttttttaagcagtggtatcaacgcagagtacnntaagaccgnnaacgacctnntttttttttttttttttttttttttttttt

SEQ ID NO: 8673 - DNA, 84 bp, Artificial
  Barcode component
  misc_feature (33)..(34): n is a, c, g, or t
  misc_feature (43)..(44): n is a, c, g, or t
  misc_feature (53)..(54): n is a, c, g, or t
tttttttaagcagtggtatcaacgcagagtacnntaagaccgnnatcaggctnntttttttttttttttttttttttttttttt

SEQ ID NO: 8674 - DNA, 84 bp, Artificial
  Barcode component
  misc_feature (33)..(34): n is a, c, g, or t
  misc_feature (43)..(44): n is a, c, g, or t
  misc_feature (53)..(54): n is a, c, g, or t
tttttttaagcagtggtatcaacgcagagtacnntaagaccgnncaagttcgnntttttttttttttttttttttttttttttt

SEQ ID NO: 8675 - DNA, 84 bp, Artificial
  Barcode component
  misc_feature (33)..(34): n is a, c, g, or t
  misc_feature (43)..(44): n is a, c, g, or t
  misc_feature (53)..(54): n is a, c, g, or t
tttttttaagcagtggtatcaacgcagagtacnntaagaccgnntagccaganntttttttttttttttttttttttttttttt

SEQ ID NO: 8676 - DNA, 84 bp, Artificial
  Barcode component
  misc_feature (33)..(34): n is a, c, g, or t
  misc_feature (43)..(44): n is a, c, g, or t
  misc_feature (53)..(54): n is a, c, g, or t
tttttttaagcagtggtatcaacgcagagtacnntaagaccgnncaatcacgnntttttttttttttttttttttttttttttt

SEQ ID NO: 8677 - DNA, 84 bp, Artificial
  Barcode component
  misc_feature (33)..(34): n is a, c, g, or t
  misc_feature (43)..(44): n is a, c, g, or t
  misc_feature (53)..(54): n is a, c, g, or t
tttttttaagcagtggtatcaacgcagagtacnntaagaccgnngcaacaagnntttttttttttttttttttttttttttttt

SEQ ID NO: 8678 - DNA, 84 bp, Artificial
  Barcode component
  misc_feature (33)..(34): n is a, c, g, or t
  misc_feature (43)..(44): n is a, c, g, or t
  misc_feature (53)..(54): n is a, c, g, or t
tttttttaagcagtggtatcaacgcagagtacnntaagaccgnncacgacaanntttttttttttttttttttttttttttttt

SEQ ID NO: 8679 - DNA, 84 bp, Artificial
  Barcode component
  misc_feature (33)..(34): n is a, c, g, or t
  misc_feature (43)..(44): n is a, c, g, or t
  misc_feature (53)..(54): n is a, c, g, or t
tttttttaagcagtggtatcaacgcagagtacnntaagaccgnntacggaganntttttttttttttttttttttttttttttt

SEQ ID NO: 8680 - DNA, 84 bp, Artificial
  Barcode component
  misc_feature (33)..(34): n is a, c, g, or t
  misc_feature (43)..(44): n is a, c, g, or t
  misc_feature (53)..(54): n is a, c, g, or t
tttttttaagcagtggtatcaacgcagagtacnntaagaccgnncgacaaganntttttttttttttttttttttttttttttt

SEQ ID NO: 8681 - DNA, 84 bp, Artificial
  Barcode component
  misc_feature (33)..(34): n is a, c, g, or t
  misc_feature (43)..(44): n is a, c, g, or t
  misc_feature (53)..(54): n is a, c, g, or t
tttttttaagcagtggtatcaacgcagagtacnntaagaccgnncgaagtganntttttttttttttttttttttttttttttt

SEQ ID NO: 8682 - DNA, 84 bp, Artificial
  Barcode component
  misc_feature (33)..(34): n is a, c, g, or t
  misc_feature (43)..(44): n is a, c, g, or t
  misc_feature (53)..(54): n is a, c, g, or t
tttttttaagcagtggtatcaacgcagagtacnntaagaccgnnagctggtanntttttttttttttttttttttttttttttt

SEQ ID NO: 8683 - DNA, 84 bp, Artificial
  Barcode component
  misc_feature (33)..(34): n is a, c, g, or t
  misc_feature (43)..(44): n is a, c, g, or t
  misc_feature (53)..(54): n is a, c, g, or t
tttttttaagcagtggtatcaacgcagagtacnntaagaccgnnaactaggcnntttttttttttttttttttttttttttttt

SEQ ID NO: 8684 - DNA, 84 bp, Artificial
  Barcode component
  misc_feature (33)..(34): n is a, c, g, or t
  misc_feature (43)..(44): n is a, c, g, or t
  misc_feature (53)..(54): n is a, c, g, or t
tttttttaagcagtggtatcaacgcagagtacnntaagaccgnncagcaagtnntttttttttttttttttttttttttttttt

SEQ ID NO: 8685 - DNA, 84 bp, Artificial
  Barcode component
  misc_feature (33)..(34): n is a, c, g, or t
  misc_feature (43)..(44): n is a, c, g, or t
  misc_feature (53)..(54): n is a, c, g, or t
tttttttaagcagtggtatcaacgcagagtacnntaagaccgnnacgaggtanntttttttttttttttttttttttttttttt

SEQ ID NO: 8686 - DNA, 84 bp, Artificial
  Barcode component
  misc_feature (33)..(34): n is a, c, g, or t
  misc_feature (43)..(44): n is a, c, g, or t
  misc_feature (53)..(54): n is a, c, g, or t
tttttttaagcagtggtatcaacgcagagtacnntaagaccgnncatcttccnntttttttttttttttttttttttttttttt

SEQ ID NO: 8687 - DNA, 84 bp, Artificial
  Barcode component
  misc_feature (33)..(34): n is a, c, g, or t
  misc_feature (43)..(44): n is a, c, g, or t
  misc_feature (53)..(54): n is a, c, g, or t
tttttttaagcagtggtatcaacgcagagtacnntaagaccgnncctgaatcnntttttttttttttttttttttttttttttt

SEQ ID NO: 8688 - DNA, 84 bp, Artificial
  Barcode component
  misc_feature (33)..(34): n is a, c, g, or t
  misc_feature (43)..(44): n is a, c, g, or t
  misc_feature (53)..(54): n is a, c, g, or t
tttttttaagcagtggtatcaacgcagagtacnntaagaccgnntgcagactnntttttttttttttttttttttttttttttt

SEQ ID NO: 8689 - DNA, 84 bp, Artificial
  Barcode component
  misc_feature (33)..(34): n is a, c, g, or t
  misc_feature (43)..(44): n is a, c, g, or t
  misc_feature (53)..(54): n is a, c, g, or t
tttttttaagcagtggtatcaacgcagagtacnntaagaccgnnagatgtggnntttttttttttttttttttttttttttttt

SEQ ID NO: 8690 - DNA, 84 bp, Artificial
  Barcode component
  misc_feature (33)..(34): n is a, c, g, or t
  misc_feature (43)..(44): n is a, c, g, or t
  misc_feature (53)..(54): n is a, c, g, or t
tttttttaagcagtggtatcaacgcagagtacnntaagaccgnnagttcgacnntttttttttttttttttttttttttttttt

SEQ ID NO: 8691 - DNA, 84 bp, Artificial
  Barcode component
  misc_feature (33)..(34): n is a, c, g, or t
  misc_feature (43)..(44): n is a, c, g, or t
  misc_feature (53)..(54): n is a, c, g, or t
tttttttaagcagtggtatcaacgcagagtacnntaagaccgnnacaacctcnntttttttttttttttttttttttttttttt

SEQ ID NO: 8692 - DNA, 84 bp, Artificial
  Barcode component
  misc_feature (33)..(34): n is a, c, g, or t
  misc_feature (43)..(44): n is a, c, g, or t
  misc_feature (53)..(54): n is a, c, g, or t
tttttttaagcagtggtatcaacgcagagtacnntaagaccgnncatggtagnntttttttttttttttttttttttttttttt

SEQ ID NO: 8693 - DNA, 84 bp, Artificial
  Barcode component
  misc_feature (33)..(34): n is a, c, g, or t
  misc_feature (43)..(44): n is a, c, g, or t
  misc_feature (53)..(54): n is a, c, g, or t
tttttttaagcagtggtatcaacgcagagtacnntaagaccgnncgtatctcnntttttttttttttttttttttttttttttt

SEQ ID NO: 8694 - DNA, 84 bp, Artificial
  Barcode component
  misc_feature (33)..(34): n is a, c, g, or t
  misc_feature (43)..(44): n is a, c, g, or t
  misc_feature (53)..(54): n is a, c, g, or t
tttttttaagcagtggtatcaacgcagagtacnntaagaccgnncctagttcnntttttttttttttttttttttttttttttt

SEQ ID NO: 8695 - DNA, 84 bp, Artificial
  Barcode component
  misc_feature (33)..(34): n is a, c, g, or t
  misc_feature (43)..(44): n is a, c, g, or t
  misc_feature (53)..(54): n is a, c, g, or t
tttttttaagcagtggtatcaacgcagagtacnntaagaccgnncaagagtcnntttttttttttttttttttttttttttttt

SEQ ID NO: 8696 - DNA, 84 bp, Artificial
  Barcode component
  misc_feature (33)..(34): n is a, c, g, or t
  misc_feature (43)..(44): n is a, c, g, or t
  misc_feature (53)..(54): n is a, c, g, or t
tttttttaagcagtggtatcaacgcagagtacnntctatggcnnaatcggcanntttttttttttttttttttttttttttttt

SEQ ID NO: 8697 - DNA, 84 bp, Artificial
  Barcode component
  misc_feature (33)..(34): n is a, c, g, or t
  misc_feature (43)..(44): n is a, c, g, or t
  misc_feature (53)..(54): n is a, c, g, or t
tttttttaagcagtggtatcaacgcagagtacnntctatggcnntacggcatnntttttttttttttttttttttttttttttt

SEQ ID NO: 8698 - DNA, 84 bp, Artificial
  Barcode component
  misc_feature (33)..(34): n is a, c, g, or t
  misc_feature (43)..(44): n is a, c, g, or t
  misc_feature (53)..(54): n is a, c, g, or t
tttttttaagcagtggtatcaacgcagagtacnntctatggcnnttggatcgnntttttttttttttttttttttttttttttt

SEQ ID NO: 8699 - DNA, 84 bp, Artificial
  Barcode component
  misc_feature (33)..(34): n is a, c, g, or t
  misc_feature (43)..(44): n is a, c, g, or t
  misc_feature (53)..(54): n is a, c, g, or t
tttttttaagcagtggtatcaacgcagagtacnntctatggcnntggaacganntttttttttttttttttttttttttttttt

SEQ ID NO: 8700 - DNA, 84 bp, Artificial
  Barcode component
  misc_feature (33)..(34): n is a, c, g, or t
  misc_feature (43)..(44): n is a, c, g, or t
  misc_feature (53)..(54): n is a, c, g, or t
tttttttaagcagtggtatcaacgcagagtacnntctatggcnnggcaatcanntttttttttttttttttttttttttttttt

SEQ ID NO: 8701 - DNA, 84 bp, Artificial
  Barcode component
  misc_feature (33)..(34): n is a, c, g, or t
  misc_feature (43)..(44): n is a, c, g, or t
  misc_feature (53)..(54): n is a, c, g, or t
tttttttaagcagtggtatcaacgcagagtacnntctatggcnngaatccganntttttttttttttttttttttttttttttt

SEQ ID NO: 8702 - DNA, 84 bp, Artificial
  Barcode component
  misc_feature (33)..(34): n is a, c, g, or t
  misc_feature (43)..(44): n is a, c, g, or t
  misc_feature (53)..(54): n is a, c, g, or t
tttttttaagcagtggtatcaacgcagagtacnntctatggcnnttacggtgnntttttttttttttttttttttttttttttt

SEQ ID NO: 8703 - DNA, 84 bp, Artificial
  Barcode component
  misc_feature (33)..(34): n is a, c, g, or t
  misc_feature (43)..(44): n is a, c, g, or t
  misc_feature (53)..(54): n is a, c, g, or t
tttttttaagcagtggtatcaacgcagagtacnntctatggcnncatatcggnntttttttttttttttttttttttttttttt

SEQ ID NO: 8704 - DNA, 84 bp, Artificial
  Barcode component
  misc_feature (33)..(34): n is a, c, g, or t
  misc_feature (43)..(44): n is a, c, g, or t
  misc_feature (53)..(54): n is a, c, g, or t
tttttttaagcagtggtatcaacgcagagtacnntctatggcnncttcggtanntttttttttttttttttttttttttttttt

SEQ ID NO: 8705 - DNA, 84 bp, Artificial
  Barcode component
  misc_feature (33)..(34): n is a, c, g, or t
  misc_feature (43)..(44): n is a, c, g, or t
  misc_feature (53)..(54): n is a, c, g, or t
tttttttaagcagtggtatcaacgcagagtacnntctatggcnntcctaacgnntttttttttttttttttttttttttttttt

SEQ ID NO: 8706 - DNA, 84 bp, Artificial
  Barcode component
  misc_feature (33)..(34): n is a, c, g, or t
  misc_feature (43)..(44): n is a, c, g, or t
  misc_feature (53)..(54): n is a, c, g, or t
tttttttaagcagtggtatcaacgcagagtacnntctatggcnngtaagccanntttttttttttttttttttttttttttttt

SEQ ID NO: 8707 - DNA, 84 bp, Artificial
  Barcode component
  misc_feature (33)..(34): n is a, c, g, or t
  misc_feature (43)..(44): n is a, c, g, or t
  misc_feature (53)..(54): n is a, c, g, or t
tttttttaagcagtggtatcaacgcagagtacnntctatggcnntaaggtggnntttttttttttttttttttttttttttttt

SEQ ID NO: 8708 - DNA, 84 bp, Artificial
  Barcode component
  misc_feature (33)..(34): n is a, c, g, or t
  misc_feature (43)..(44): n is a, c, g, or t
  misc_feature (53)..(54): n is a, c, g, or t
tttttttaagcagtggtatcaacgcagagtacnntctatggcnnggtaagctnntttttttttttttttttttttttttttttt

SEQ ID NO: 8709 - DNA, 84 bp, Artificial
  Barcode component
  misc_feature (33)..(34): n is a, c, g, or t
  misc_feature (43)..(44): n is a, c, g, or t
  misc_feature (53)..(54): n is a, c, g, or t
tttttttaagcagtggtatcaacgcagagtacnntctatggcnntgtgtcganntttttttttttttttttttttttttttttt

SEQ ID NO: 8710 - DNA, 84 bp, Artificial
  Barcode component
  misc_feature (33)..(34): n is a, c, g, or t
  misc_feature (43)..(44): n is a, c, g, or t
  misc_feature (53)..(54): n is a, c, g, or t
tttttttaagcagtggtatcaacgcagagtacnntctatggcnngagcatganntttttttttttttttttttttttttttttt

SEQ ID NO: 8711 - DNA, 84 bp, Artificial
  Barcode component
  misc_feature (33)..(34): n is a, c, g, or t
  misc_feature (43)..(44): n is a, c, g, or t
  misc_feature (53)..(54): n is a, c, g, or t
tttttttaagcagtggtatcaacgcagagtacnntctatggcnntcgaagtcnntttttttttttttttttttttttttttttt

SEQ ID NO: 8712 - DNA, 84 bp, Artificial
  Barcode component
  misc_feature (33)..(34): n is a, c, g, or t
  misc_feature (43)..(44): n is a, c, g, or t
  misc_feature (53)..(54): n is a, c, g, or t
tttttttaagcagtggtatcaacgcagagtacnntctatggcnnggtgaacanntttttttttttttttttttttttttttttt

SEQ ID NO: 8713 - DNA, 84 bp, Artificial
  Barcode component
  misc_feature (33)..(34): n is a, c, g, or t
  misc_feature (43)..(44): n is a, c, g, or t
  misc_feature (53)..(54): n is a, c, g, or t
tttttttaagcagtggtatcaacgcagagtacnntctatggcnnacatgcacnntttttttttttttttttttttttttttttt

SEQ ID NO: 8714 - DNA, 84 bp, Artificial
  Barcode component
  misc_feature (33)..(34): n is a, c, g, or t
  misc_feature (43)..(44): n is a, c, g, or t
  misc_feature (53)..(54): n is a, c, g, or t
tttttttaagcagtggtatcaacgcagagtacnntctatggcnnccaacagtnntttttttttttttttttttttttttttttt

SEQ ID NO: 8715 - DNA, 84 bp, Artificial
  Barcode component
  misc_feature (33)..(34): n is a, c, g, or t
  misc_feature (43)..(44): n is a, c, g, or t
  misc_feature (53)..(54): n is a, c, g, or t
tttttttaagcagtggtatcaacgcagagtacnntctatggcnnagaacagcnntttttttttttttttttttttttttttttt

SEQ ID NO: 8716 - DNA, 84 bp, Artificial
  Barcode component
  misc_feature (33)..(34): n is a, c, g, or t
  misc_feature (43)..(44): n is a, c, g, or t
  misc_feature (53)..(54): n is a, c, g, or t
tttttttaagcagtggtatcaacgcagagtacnntctatggcnngaacacgtnntttttttttttttttttttttttttttttt

SEQ ID NO: 8717 - DNA, 84 bp, Artificial
  Barcode component
  misc_feature (33)..(34): n is a, c, g, or t
  misc_feature (43)..(44): n is a, c, g, or t
  misc_feature (53)..(54): n is a, c, g, or t
tttttttaagcagtggtatcaacgcagagtacnntctatggcnnggtcttcanntttttttttttttttttttttttttttttt

SEQ ID NO: 8718 - DNA, 84 bp, Artificial
  Barcode component
  misc_feature (33)..(34): n is a, c, g, or t
  misc_feature (43)..(44): n is a, c, g, or t
  misc_feature (53)..(54): n is a, c, g, or t
tttttttaagcagtggtatcaacgcagagtacnntctatggcnnaggttcagnntttttttttttttttttttttttttttttt

SEQ ID NO: 8719 - DNA, 84 bp, Artificial
  Barcode component
  misc_feature (33)..(34): n is a, c, g, or t
  misc_feature (43)..(44): n is a, c, g, or t
  misc_feature (53)..(54): n is a, c, g, or t
tttttttaagcagtggtatcaacgcagagtacnntctatggcnnctagagcanntttttttttttttttttttttttttttttt

SEQ ID NO: 8720 - DNA, 84 bp, Artificial
  Barcode component
  misc_feature (33)..(34): n is a, c, g, or t
  misc_feature (43)..(44): n is a, c, g, or t
  misc_feature (53)..(54): n is a, c, g, or t
tttttttaagcagtggtatcaacgcagagtacnntctatggcnncttctagcnntttttttttttttttttttttttttttttt

SEQ ID NO: 8721 - DNA, 84 bp, Artificial
  Barcode component
  misc_feature (33)..(34): n is a, c, g, or t
  misc_feature (43)..(44): n is a, c, g, or t
  misc_feature (53)..(54): n is a, c, g, or t
tttttttaagcagtggtatcaacgcagagtacnntctatggcnngagtaacgnntttttttttttttttttttttttttttttt

SEQ ID NO: 8722 - DNA, 84 bp, Artificial
  Barcode component
  misc_feature (33)..(34): n is a, c, g, or t
  misc_feature (43)..(44): n is a, c, g, or t
  misc_feature (53)..(54): n is a, c, g, or t
tttttttaagcagtggtatcaacgcagagtacnntctatggcnnctaagaggnntttttttttttttttttttttttttttttt

SEQ ID NO: 8723 - DNA, 84 bp, Artificial
  Barcode component
  misc_feature (33)..(34): n is a, c, g, or t
  misc_feature (43)..(44): n is a, c, g, or t
  misc_feature (53)..(54): n is a, c, g, or t
tttttttaagcagtggtatcaacgcagagtacnntctatggcnnacgtgtagnntttttttttttttttttttttttttttttt

SEQ ID NO: 8724 - DNA, 84 bp, Artificial
  Barcode component
  misc_feature (33)..(34): n is a, c, g, or t
  misc_feature (43)..(44): n is a, c, g, or t
  misc_feature (53)..(54): n is a, c, g, or t
tttttttaagcagtggtatcaacgcagagtacnntctatggcnnactacaggnntttttttttttttttttttttttttttttt

SEQ ID NO: 8725 - DNA, 84 bp, Artificial
  Barcode component
  misc_feature (33)..(34): n is a, c, g, or t
  misc_feature (43)..(44): n is a, c, g, or t
  misc_feature (53)..(54): n is a, c, g, or t
tttttttaagcagtggtatcaacgcagagtacnntctatggcnntacaggtcnntttttttttttttttttttttttttttttt

SEQ ID NO: 8726 - DNA, 84 bp, Artificial
  Barcode component
  misc_feature (33)..(34): n is a, c, g, or t
  misc_feature (43)..(44): n is a, c, g, or t
  misc_feature (53)..(54): n is a, c, g, or t
tttttttaagcagtggtatcaacgcagagtacnntctatggcnnctcacatgnntttttttttttttttttttttttttttttt

SEQ ID NO: 8727 - DNA, 84 bp, Artificial
  Barcode component
  misc_feature (33)..(34): n is a, c, g, or t
  misc_feature (43)..(44): n is a, c, g, or t
  misc_feature (53)..(54): n is a, c, g, or t
tttttttaagcagtggtatcaacgcagagtacnntctatggcnnactaggagnntttttttttttttttttttttttttttttt

SEQ ID NO: 8728 - DNA, 84 bp, Artificial
  Barcode component
  misc_feature (33)..(34): n is a, c, g, or t
  misc_feature (43)..(44): n is a, c, g, or t
  misc_feature (53)..(54): n is a, c, g, or t
tttttttaagcagtggtatcaacgcagagtacnntctatggcnnccatagganntttttttttttttttttttttttttttttt

SEQ ID NO: 8729 - DNA, 84 bp, Artificial
  Barcode component
  misc_feature (33)..(34): n is a, c, g, or t
  misc_feature (43)..(44): n is a, c, g, or t
  misc_feature (53)..(54): n is a, c, g, or t
tttttttaagcagtggtatcaacgcagagtacnntctatggcnnggagaatcnntttttttttttttttttttttttttttttt

SEQ ID NO: 8730 - DNA, 84 bp, Artificial
  Barcode component
  misc_feature (33)..(34): n is a, c, g, or t
  misc_feature (43)..(44): n is a, c, g, or t
  misc_feature (53)..(54): n is a, c, g, or t
tttttttaagcagtggtatcaacgcagagtacnntctatggcnngccaagaanntttttttttttttttttttttttttttttt

SEQ ID NO: 8731 - DNA, 84 bp, Artificial
  Barcode component
  misc_feature (33)..(34): n is a, c, g, or t
  misc_feature (43)..(44): n is a, c, g, or t
  misc_feature (53)..(54): n is a, c, g, or t
tttttttaagcagtggtatcaacgcagagtacnntctatggcnnaaggcaagnntttttttttttttttttttttttttttttt

SEQ ID NO: 8732 - DNA, 84 bp, Artificial
  Barcode component
  misc_feature (33)..(34): n is a, c, g, or t
  misc_feature (43)..(44): n is a, c, g, or t
  misc_feature (53)..(54): n is a, c, g, or t
tttttttaagcagtggtatcaacgcagagtacnntctatggcnnaatgtcgcnntttttttttttttttttttttttttttttt

SEQ ID NO: 8733 - DNA, 84 bp, Artificial
  Barcode component
  misc_feature (33)..(34): n is a, c, g, or t
  misc_feature (43)..(44): n is a, c, g, or t
  misc_feature (53)..(54): n is a, c, g, or t
tttttttaagcagtggtatcaacgcagagtacnntctatggcnnatggaaccnntttttttttttttttttttttttttttttt

SEQ ID NO: 8734 - DNA, 84 bp, Artificial
  Barcode component
  misc_feature (33)..(34): n is a, c, g, or t
  misc_feature (43)..(44): n is a, c, g, or t
  misc_feature (53)..(54): n is a, c, g, or t
tttttttaagcagtggtatcaacgcagagtacnntctatggcnnagaggcatnntttttttttttttttttttttttttttttt

SEQ ID NO: 8735 - DNA, 84 bp, Artificial
  Barcode component
  misc_feature (33)..(34): n is a, c, g, or t
  misc_feature (43)..(44): n is a, c, g, or t
  misc_feature (53)..(54): n is a, c, g, or t
tttttttaagcagtggtatcaacgcagagtacnntctatggcnntgcatagcnntttttttttttttttttttttttttttttt

SEQ ID NO: 8736 - DNA, 84 bp, Artificial
  Barcode component
  misc_feature (33)..(34): n is a, c, g, or t
  misc_feature (43)..(44): n is a, c, g, or t
  misc_feature (53)..(54): n is a, c, g, or t
tttttttaagcagtggtatcaacgcagagtacnntctatggcnnctaacgganntttttttttttttttttttttttttttttt

SEQ ID NO: 8737 - DNA, 84 bp, Artificial
  Barcode component
  misc_feature (33)..(34): n is a, c, g, or t
  misc_feature (43)..(44): n is a, c, g, or t
  misc_feature (53)..(54): n is a, c, g, or t
tttttttaagcagtggtatcaacgcagagtacnntctatggcnntatcgaggnntttttttttttttttttttttttttttttt

SEQ ID NO: 8738 - DNA, 84 bp, Artificial
  Barcode component
  misc_feature (33)..(34): n is a, c, g, or t
  misc_feature (43)..(44): n is a, c, g, or t
  misc_feature (53)..(54): n is a, c, g, or t
tttttttaagcagtggtatcaacgcagagtacnntctatggcnncatagcctnntttttttttttttttttttttttttttttt

SEQ ID NO: 8739 - DNA, 84 bp, Artificial
  Barcode component
  misc_feature (33)..(34): n is a, c, g, or t
  misc_feature (43)..(44): n is a, c, g, or t
  misc_feature (53)..(54): n is a, c, g, or t
tttttttaagcagtggtatcaacgcagagtacnntctatggcnnatcgagacnntttttttttttttttttttttttttttttt

SEQ ID NO: 8740 - DNA, 84 bp, Artificial
  Barcode component
  misc_feature (33)..(34): n is a, c, g, or t
  misc_feature (43)..(44): n is a, c, g, or t
  misc_feature (53)..(54): n is a, c, g, or t
tttttttaagcagtggtatcaacgcagagtacnntctatggcnnggaagagtnntttttttttttttttttttttttttttttt

SEQ ID NO: 8741 - DNA, 84 bp, Artificial
  Barcode component
  misc_feature (33)..(34): n is a, c, g, or t
  misc_feature (43)..(44): n is a, c, g, or t
  misc_feature (53)..(54): n is a, c, g, or t
tttttttaagcagtggtatcaacgcagagtacnntctatggcnnccaagtagnntttttttttttttttttttttttttttttt

SEQ ID NO: 8742 - DNA, 84 bp, Artificial
  Barcode component
  misc_feature (33)..(34): n is a, c, g, or t
  misc_feature (43)..(44): n is a, c, g, or t
  misc_feature (53)..(54): n is a, c, g, or t
tttttttaagcagtggtatcaacgcagagtacnntctatggcnnctgaacagnntttttttttttttttttttttttttttttt

SEQ ID NO: 8743 - DNA, 84 bp, Artificial
  Barcode component
  misc_feature (33)..(34): n is a, c, g, or t
  misc_feature (43)..(44): n is a, c, g, or t
  misc_feature (53)..(54): n is a, c, g, or t
tttttttaagcagtggtatcaacgcagagtacnntctatggcnngtaggttcnntttttttttttttttttttttttttttttt

SEQ ID NO: 8744 - DNA, 84 bp, Artificial
  Barcode component
  misc_feature (33)..(34): n is a, c, g, or t
  misc_feature (43)..(44): n is a, c, g, or t
  misc_feature (53)..(54): n is a, c, g, or t
tttttttaagcagtggtatcaacgcagagtacnntctatggcnngtatggacnntttttttttttttttttttttttttttttt

SEQ ID NO: 8745 - DNA, 84 bp, Artificial
  Barcode component
  misc_feature (33)..(34): n is a, c, g, or t
  misc_feature (43)..(44): n is a, c, g, or t
  misc_feature (53)..(54): n is a, c, g, or t
tttttttaagcagtggtatcaacgcagagtacnntctatggcnntcgcaacanntttttttttttttttttttttttttttttt

SEQ ID NO: 8746 - DNA, 84 bp, Artificial
  Barcode component
  misc_feature (33)..(34): n is a, c, g, or t
  misc_feature (43)..(44): n is a, c, g, or t
  misc_feature (53)..(54): n is a, c, g, or t
tttttttaagcagtggtatcaacgcagagtacnntctatggcnnccgctaatnntttttttttttttttttttttttttttttt

SEQ ID NO: 8747 - DNA, 84 bp, Artificial
  Barcode component
  misc_feature (33)..(34): n is a, c, g, or t
  misc_feature (43)..(44): n is a, c, g, or t
  misc_feature (53)..(54): n is a, c, g, or t
tttttttaagcagtggtatcaacgcagagtacnntctatggcnngattcgcanntttttttttttttttttttttttttttttt

SEQ ID NO: 8748 - DNA, 84 bp, Artificial
  Barcode component
  misc_feature (33)..(34): n is a, c, g, or t
  misc_feature (43)..(44): n is a, c, g, or t
  misc_feature (53)..(54): n is a, c, g, or t
tttttttaagcagtggtatcaacgcagagtacnntctatggcnncgatggaanntttttttttttttttttttttttttttttt

SEQ ID NO: 8749 - DNA, 84 bp, Artificial
  Barcode component
  misc_feature (33)..(34): n is a, c, g, or t
  misc_feature (43)..(44): n is a, c, g, or t
  misc_feature (53)..(54): n is a, c, g, or t
tttttttaagcagtggtatcaacgcagagtacnntctatggcnnagcaagganntttttttttttttttttttttttttttttt

SEQ ID NO: 8750 - DNA, 84 bp, Artificial
  Barcode component
  misc_feature (33)..(34): n is a, c, g, or t
  misc_feature (43)..(44): n is a, c, g, or t
  misc_feature (53)..(54): n is a, c, g, or t
tttttttaagcagtggtatcaacgcagagtacnntctatggcnncgtagcaanntttttttttttttttttttttttttttttt

SEQ ID NO: 8751 - DNA, 84 bp, Artificial
  Barcode component
  misc_feature (33)..(34): n is a, c, g, or t
  misc_feature (43)..(44): n is a, c, g, or t
  misc_feature (53)..(54): n is a, c, g, or t
tttttttaagcagtggtatcaacgcagagtacnntctatggcnntggcagtanntttttttttttttttttttttttttttttt

SEQ ID NO: 8752 - DNA, 84 bp, Artificial
  Barcode component
  misc_feature (33)..(34): n is a, c, g, or t
  misc_feature (43)..(44): n is a, c, g, or t
  misc_feature (53)..(54): n is a, c, g, or t
tttttttaagcagtggtatcaacgcagagtacnntctatggcnncggtagttnntttttttttttttttttttttttttttttt

SEQ ID NO: 8753 - DNA, 84 bp, Artificial
  Barcode component
  misc_feature (33)..(34): n is a, c, g, or t
  misc_feature (43)..(44): n is a, c, g, or t
  misc_feature (53)..(54): n is a, c, g, or t
tttttttaagcagtggtatcaacgcagagtacnntctatggcnntgacttcgnntttttttttttttttttttttttttttttt

SEQ ID NO: 8754 - DNA, 84 bp, Artificial
  Barcode component
  misc_feature (33)..(34): n is a, c, g, or t
  misc_feature (43)..(44): n is a, c, g, or t
  misc_feature (53)..(54): n is a, c, g, or t
tttttttaagcagtggtatcaacgcagagtacnntctatggcnngagtgcaanntttttttttttttttttttttttttttttt

SEQ ID NO: 8755 - DNA, 84 bp, Artificial
  Barcode component
  misc_feature (33)..(34): n is a, c, g, or t
  misc_feature (43)..(44): n is a, c, g, or t
  misc_feature (53)..(54): n is a, c, g, or t
tttttttaagcagtggtatcaacgcagagtacnntctatggcnnacggtaacnntttttttttttttttttttttttttttttt

SEQ ID NO: 8756 - DNA, 84 bp, Artificial
  Barcode component
  misc_feature (33)..(34): n is a, c, g, or t
  misc_feature (43)..(44): n is a, c, g, or t
  misc_feature (53)..(54): n is a, c, g, or t
tttttttaagcagtggtatcaacgcagagtacnntctatggcnnaagtggtgnntttttttttttttttttttttttttttttt

SEQ ID NO: 8757 - DNA, 84 bp, Artificial
  Barcode component
  misc_feature (33)..(34): n is a, c, g, or t
  misc_feature (43)..(44): n is a, c, g, or t
  misc_feature (53)..(54): n is a, c, g, or t
tttttttaagcagtggtatcaacgcagagtacnntctatggcnnggagacaanntttttttttttttttttttttttttttttt

SEQ ID NO: 8758 - DNA, 84 bp, Artificial
  Barcode component
  misc_feature (33)..(34): n is a, c, g, or t
  misc_feature (43)..(44): n is a, c, g, or t
  misc_feature (53)..(54): n is a, c, g, or t
tttttttaagcagtggtatcaacgcagagtacnntctatggcnntcaaggacnntttttttttttttttttttttttttttttt

SEQ ID NO: 8759 - DNA, 84 bp, Artificial
  Barcode component
  misc_feature (33)..(34): n is a, c, g, or t
  misc_feature (43)..(44): n is a, c, g, or t
  misc_feature (53)..(54): n is a, c, g, or t
tttttttaagcagtggtatcaacgcagagtacnntctatggcnnaagagagcnntttttttttttttttttttttttttttttt

SEQ ID NO: 8760 - DNA, 84 bp, Artificial
  Barcode component
  misc_feature (33)..(34): n is a, c, g, or t
  misc_feature (43)..(44): n is a, c, g, or t
  misc_feature (53)..(54): n is a, c, g, or t
tttttttaagcagtggtatcaacgcagagtacnntctatggcnncgagagatnntttttttttttttttttttttttttttttt

SEQ ID NO: 8761 - DNA, 84 bp, Artificial
  Barcode component
  misc_feature (33)..(34): n is a, c, g, or t
  misc_feature (43)..(44): n is a, c, g, or t
  misc_feature (53)..(54): n is a, c, g, or t
tttttttaagcagtggtatcaacgcagagtacnntctatggcnnacagatggnntttttttttttttttttttttttttttttt

SEQ ID NO: 8762 - DNA, 84 bp, Artificial
  Barcode component
  misc_feature (33)..(34): n is a, c, g, or t
  misc_feature (43)..(44): n is a, c, g, or t
  misc_feature (53)..(54): n is a, c, g, or t
tttttttaagcagtggtatcaacgcagagtacnntctatggcnnaggagtcanntttttttttttttttttttttttttttttt

SEQ ID NO: 8763 - DNA, 84 bp, Artificial
  Barcode component
  misc_feature (33)..(34): n is a, c, g, or t
  misc_feature (43)..(44): n is a, c, g, or t
  misc_feature (53)..(54): n is a, c, g, or t
tttttttaagcagtggtatcaacgcagagtacnntctatggcnncgtgttacnntttttttttttttttttttttttttttttt

SEQ ID NO: 8764 - DNA, 84 bp, Artificial
  Barcode component
  misc_feature (33)..(34): n is a, c, g, or t
  misc_feature (43)..(44): n is a, c, g, or t
  misc_feature (53)..(54): n is a, c, g, or t
tttttttaagcagtggtatcaacgcagagtacnntctatggcnntagtgtgcnntttttttttttttttttttttttttttttt

SEQ ID NO: 8765 - DNA, 84 bp, Artificial
  Barcode component
  misc_feature (33)..(34): n is a, c, g, or t
  misc_feature (43)..(44): n is a, c, g, or t
  misc_feature (53)..(54): n is a, c, g, or t
tttttttaagcagtggtatcaacgcagagtacnntctatggcnnctcatgacnntttttttttttttttttttttttttttttt

SEQ ID NO: 8766 - DNA, 84 bp, Artificial
  Barcode component
  misc_feature (33)..(34): n is a, c, g, or t
  misc_feature (43)..(44): n is a, c, g, or t
  misc_feature (53)..(54): n is a, c, g, or t
tttttttaagcagtggtatcaacgcagagtacnntctatggcnngtatccagnntttttttttttttttttttttttttttttt

SEQ ID NO: 8767 - DNA, 84 bp, Artificial
  Barcode component
  misc_feature (33)..(34): n is a, c, g, or t
  misc_feature (43)..(44): n is a, c, g, or t
  misc_feature (53)..(54): n is a, c, g, or t
tttttttaagcagtggtatcaacgcagagtacnntctatggcnnacgcctatnntttttttttttttttttttttttttttttt

SEQ ID NO: 8768 - DNA, 84 bp, Artificial
  Barcode component
  misc_feature (33)..(34): n is a, c, g, or t
  misc_feature (43)..(44): n is a, c, g, or t
  misc_feature (53)..(54): n is a, c, g, or t
tttttttaagcagtggtatcaacgcagagtacnntctatggcnnaacgacctnntttttttttttttttttttttttttttttt

SEQ ID NO: 8769 - DNA, 84 bp, Artificial
  Barcode component
  misc_feature (33)..(34): n is a, c, g, or t
  misc_feature (43)..(44): n is a, c, g, or t
  misc_feature (53)..(54): n is a, c, g, or t
tttttttaagcagtggtatcaacgcagagtacnntctatggcnnatcaggctnntttttttttttttttttttttttttttttt

SEQ ID NO: 8770 - DNA, 84 bp, Artificial
  Barcode component
  misc_feature (33)..(34): n is a, c, g, or t
  misc_feature (43)..(44): n is a, c, g, or t
  misc_feature (53)..(54): n is a, c, g, or t
tttttttaagcagtggtatcaacgcagagtacnntctatggcnncaagttcgnntttttttttttttttttttttttttttttt

SEQ ID NO: 8771 - DNA, 84 bp, Artificial
  Barcode component
  misc_feature (33)..(34): n is a, c, g, or t
  misc_feature (43)..(44): n is a, c, g, or t
  misc_feature (53)..(54): n is a, c, g, or t
tttttttaagcagtggtatcaacgcagagtacnntctatggcnntagccaganntttttttttttttttttttttttttttttt

SEQ ID NO: 8772 - DNA, 84 bp, Artificial
  Barcode component
  misc_feature (33)..(34): n is a, c, g, or t
  misc_feature (43)..(44): n is a, c, g, or t
  misc_feature (53)..(54): n is a, c, g, or t
tttttttaagcagtggtatcaacgcagagtacnntctatggcnncaatcacgnntttttttttttttttttttttttttttttt

SEQ ID NO: 8773 - DNA, 84 bp, Artificial
  Barcode component
  misc_feature (33)..(34): n is a, c, g, or t
  misc_feature (43)..(44): n is a, c, g, or t
  misc_feature (53)..(54): n is a, c, g, or t
tttttttaagcagtggtatcaacgcagagtacnntctatggcnngcaacaagnntttttttttttttttttttttttttttttt

SEQ ID NO: 8774 - DNA, 84 bp, Artificial
  Barcode component
  misc_feature (33)..(34): n is a, c, g, or t
  misc_feature (43)..(44): n is a, c, g, or t
  misc_feature (53)..(54): n is a, c, g, or t
tttttttaagcagtggtatcaacgcagagtacnntctatggcnncacgacaanntttttttttttttttttttttttttttttt

SEQ ID NO: 8775 - DNA, 84 bp, Artificial
  Barcode component
  misc_feature (33)..(34): n is a, c, g, or t
  misc_feature (43)..(44): n is a, c, g, or t
  misc_feature (53)..(54): n is a, c, g, or t
tttttttaagcagtggtatcaacgcagagtacnntctatggcnntacggaganntttttttttttttttttttttttttttttt

SEQ ID NO: 8776 - DNA, 84 bp, Artificial
  Barcode component
  misc_feature (33)..(34): n is a, c, g, or t
  misc_feature (43)..(44): n is a, c, g, or t
  misc_feature (53)..(54): n is a, c, g, or t
tttttttaagcagtggtatcaacgcagagtacnntctatggcnncgacaaganntttttttttttttttttttttttttttttt

SEQ ID NO: 8777 - DNA, 84 bp, Artificial
  Barcode component
  misc_feature (33)..(34): n is a, c, g, or t
  misc_feature (43)..(44): n is a, c, g, or t
  misc_feature (53)..(54): n is a, c, g, or t
tttttttaagcagtggtatcaacgcagagtacnntctatggcnncgaagtganntttttttttttttttttttttttttttttt

SEQ ID NO: 8778 - DNA, 84 bp, Artificial
  Barcode component
  misc_feature (33)..(34): n is a, c, g, or t
  misc_feature (43)..(44): n is a, c, g, or t
  misc_feature (53)..(54): n is a, c, g, or t
tttttttaagcagtggtatcaacgcagagtacnntctatggcnnagctggtanntttttttttttttttttttttttttttttt

SEQ ID NO: 8779 - DNA, 84 bp, Artificial
  Barcode component
  misc_feature (33)..(34): n is a, c, g, or t
  misc_feature (43)..(44): n is a, c, g, or t
  misc_feature (53)..(54): n is a, c, g, or t
tttttttaagcagtggtatcaacgcagagtacnntctatggcnnaactaggcnntttttttttttttttttttttttttttttt

SEQ ID NO: 8780 - DNA, 84 bp, Artificial
  Barcode component
  misc_feature (33)..(34): n is a, c, g, or t
  misc_feature (43)..(44): n is a, c, g, or t
  misc_feature (53)..(54): n is a, c, g, or t
tttttttaagcagtggtatcaacgcagagtacnntctatggcnncagcaagtnntttttttttttttttttttttttttttttt

SEQ ID NO: 8781 - DNA, 84 bp, Artificial
  Barcode component
  misc_feature (33)..(34): n is a, c, g, or t
  misc_feature (43)..(44): n is a, c, g, or t
  misc_feature (53)..(54): n is a, c, g, or t
tttttttaagcagtggtatcaacgcagagtacnntctatggcnnacgaggtanntttttttttttttttttttttttttttttt

SEQ ID NO: 8782 - DNA, 84 bp, Artificial
  Barcode component
  misc_feature (33)..(34): n is a, c, g, or t
  misc_feature (43)..(44): n is a, c, g, or t
  misc_feature (53)..(54): n is a, c, g, or t
tttttttaagcagtggtatcaacgcagagtacnntctatggcnncatcttccnntttttttttttttttttttttttttttttt

SEQ ID NO: 8783 - DNA, 84 bp, Artificial
  Barcode component
  misc_feature (33)..(34): n is a, c, g, or t
  misc_feature (43)..(44): n is a, c, g, or t
  misc_feature (53)..(54): n is a, c, g, or t
tttttttaagcagtggtatcaacgcagagtacnntctatggcnncctgaatcnntttttttttttttttttttttttttttttt

SEQ ID NO: 8784 - DNA, 84 bp, Artificial
  Barcode component
  misc_feature (33)..(34): n is a, c, g, or t
  misc_feature (43)..(44): n is a, c, g, or t
  misc_feature (53)..(54): n is a, c, g, or t
tttttttaagcagtggtatcaacgcagagtacnntctatggcnntgcagactnntttttttttttttttttttttttttttttt

SEQ ID NO: 8785 - DNA, 84 bp, Artificial
  Barcode component
  misc_feature (33)..(34): n is a, c, g, or t
  misc_feature (43)..(44): n is a, c, g, or t
  misc_feature (53)..(54): n is a, c, g, or t
tttttttaagcagtggtatcaacgcagagtacnntctatggcnnagatgtggnntttttttttttttttttttttttttttttt

SEQ ID NO: 8786 - DNA, 84 bp, Artificial
  Barcode component
  misc_feature (33)..(34): n is a, c, g, or t
  misc_feature (43)..(44): n is a, c, g, or t
  misc_feature (53)..(54): n is a, c, g, or t
tttttttaagcagtggtatcaacgcagagtacnntctatggcnnagttcgacnntttttttttttttttttttttttttttttt

SEQ ID NO: 8787 - DNA, 84 bp, Artificial
  Barcode component
  misc_feature (33)..(34): n is a, c, g, or t
  misc_feature (43)..(44): n is a, c, g, or t
  misc_feature (53)..(54): n is a, c, g, or t
tttttttaagcagtggtatcaacgcagagtacnntctatggcnnacaacctcnntttttttttttttttttttttttttttttt

SEQ ID NO: 8788 - DNA, 84 bp, Artificial
  Barcode component
  misc_feature (33)..(34): n is a, c, g, or t
  misc_feature (43)..(44): n is a, c, g, or t
  misc_feature (53)..(54): n is a, c, g, or t
tttttttaagcagtggtatcaacgcagagtacnntctatggcnncatggtagnntttttttttttttttttttttttttttttt

SEQ ID NO: 8789 - DNA, 84 bp, Artificial
  Barcode component
  misc_feature (33)..(34): n is a, c, g, or t
  misc_feature (43)..(44): n is a, c, g, or t
  misc_feature (53)..(54): n is a, c, g, or t
tttttttaagcagtggtatcaacgcagagtacnntctatggcnncgtatctcnntttttttttttttttttttttttttttttt

SEQ ID NO: 8790 - DNA, 84 bp, Artificial
  Barcode component
  misc_feature (33)..(34): n is a, c, g, or t
  misc_feature (43)..(44): n is a, c, g, or t
  misc_feature (53)..(54): n is a, c, g, or t
tttttttaagcagtggtatcaacgcagagtacnntctatggcnncctagttcnntttttttttttttttttttttttttttttt

SEQ ID NO: 8791 - DNA, 84 bp, Artificial
  Barcode component
  misc_feature (33)..(34): n is a, c, g, or t
  misc_feature (43)..(44): n is a, c, g, or t
  misc_feature (53)..(54): n is a, c, g, or t
tttttttaagcagtggtatcaacgcagagtacnntctatggcnncaagagtcnntttttttttttttttttttttttttttttt

SEQ ID NO: 8792 - DNA, 84 bp, Artificial
  Barcode component
  misc_feature (33)..(34): n is a, c, g, or t
  misc_feature (43)..(44): n is a, c, g, or t
  misc_feature (53)..(54): n is a, c, g, or t
tttttttaagcagtggtatcaacgcagagtacnncaaggatgnnaatcggcanntttttttttttttttttttttttttttttt

SEQ ID NO: 8793 - DNA, 84 bp, Artificial
  Barcode component
  misc_feature (33)..(34): n is a, c, g, or t
  misc_feature (43)..(44): n is a, c, g, or t
  misc_feature (53)..(54): n is a, c, g, or t
tttttttaagcagtggtatcaacgcagagtacnncaaggatgnntacggcatnntttttttttttttttttttttttttttttt

SEQ ID NO: 8794 - DNA, 84 bp, Artificial
  Barcode component
  misc_feature (33)..(34): n is a, c, g, or t
  misc_feature (43)..(44): n is a, c, g, or t
  misc_feature (53)..(54): n is a, c, g, or t
tttttttaagcagtggtatcaacgcagagtacnncaaggatgnnttggatcgnntttttttttttttttttttttttttttttt

SEQ ID NO: 8795 - DNA, 84 bp, Artificial
  Barcode component
  misc_feature (33)..(34): n is a, c, g, or t
  misc_feature (43)..(44): n is a, c, g, or t
  misc_feature (53)..(54): n is a, c, g, or t
tttttttaagcagtggtatcaacgcagagtacnncaaggatgnntggaacganntttttttttttttttttttttttttttttt

SEQ ID NO: 8796 - DNA, 84 bp, Artificial
  Barcode component
  misc_feature (33)..(34): n is a, c, g, or t
  misc_feature (43)..(44): n is a, c, g, or t
  misc_feature (53)..(54): n is a, c, g, or t
tttttttaagcagtggtatcaacgcagagtacnncaaggatgnnggcaatcanntttttttttttttttttttttttttttttt

SEQ ID NO: 8797 - DNA, 84 bp, Artificial
  Barcode component
  misc_feature (33)..(34): n is a, c, g, or t
  misc_feature (43)..(44): n is a, c, g, or t
  misc_feature (53)..(54): n is a, c, g, or t
tttttttaagcagtggtatcaacgcagagtacnncaaggatgnngaatccganntttttttttttttttttttttttttttttt

SEQ ID NO: 8798 - DNA, 84 bp, Artificial
  Barcode component
  misc_feature (33)..(34): n is a, c, g, or t
  misc_feature (43)..(44): n is a, c, g, or t
  misc_feature (53)..(54): n is a, c, g, or t
tttttttaagcagtggtatcaacgcagagtacnncaaggatgnnttacggtgnntttttttttttttttttttttttttttttt

SEQ ID NO: 8799 - DNA, 84 bp, Artificial
  Barcode component
  misc_feature (33)..(34): n is a, c, g, or t
  misc_feature (43)..(44): n is a, c, g, or t
  misc_feature (53)..(54): n is a, c, g, or t
tttttttaagcagtggtatcaacgcagagtacnncaaggatgnncatatcggnntttttttttttttttttttttttttttttt

SEQ ID NO: 8800 - DNA, 84 bp, Artificial
  Barcode component
  misc_feature (33)..(34): n is a, c, g, or t
  misc_feature (43)..(44): n is a, c, g, or t
  misc_feature (53)..(54): n is a, c, g, or t
tttttttaagcagtggtatcaacgcagagtacnncaaggatgnncttcggtanntttttttttttttttttttttttttttttt

SEQ ID NO: 8801 - DNA, 84 bp, Artificial
  Barcode component
  misc_feature (33)..(34): n is a, c, g, or t
  misc_feature (43)..(44): n is a, c, g, or t
  misc_feature (53)..(54): n is a, c, g, or t
tttttttaagcagtggtatcaacgcagagtacnncaaggatgnntcctaacgnntttttttttttttttttttttttttttttt

SEQ ID NO: 8802 - DNA, 84 bp, Artificial
  Barcode component
  misc_feature (33)..(34): n is a, c, g, or t
  misc_feature (43)..(44): n is a, c, g, or t
  misc_feature (53)..(54): n is a, c, g, or t
tttttttaagcagtggtatcaacgcagagtacnncaaggatgnngtaagccanntttttttttttttttttttttttttttttt

SEQ ID NO: 8803 - DNA, 84 bp, Artificial
  Barcode component
  misc_feature (33)..(34): n is a, c, g, or t
  misc_feature (43)..(44): n is a, c, g, or t
  misc_feature (53)..(54): n is a, c, g, or t
tttttttaagcagtggtatcaacgcagagtacnncaaggatgnntaaggtggnntttttttttttttttttttttttttttttt

SEQ ID NO: 8804 - DNA, 84 bp, Artificial
  Barcode component
  misc_feature (33)..(34): n is a, c, g, or t
  misc_feature (43)..(44): n is a, c, g, or t
  misc_feature (53)..(54): n is a, c, g, or t
tttttttaagcagtggtatcaacgcagagtacnncaaggatgnnggtaagctnntttttttttttttttttttttttttttttt

SEQ ID NO: 8805 - DNA, 84 bp, Artificial
  Barcode component
  misc_feature (33)..(34): n is a, c, g, or t
  misc_feature (43)..(44): n is a, c, g, or t
  misc_feature (53)..(54): n is a, c, g, or t
tttttttaagcagtggtatcaacgcagagtacnncaaggatgnntgtgtcganntttttttttttttttttttttttttttttt

SEQ ID NO: 8806 - DNA, 84 bp, Artificial
  Barcode component
  misc_feature (33)..(34): n is a, c, g, or t
  misc_feature (43)..(44): n is a, c, g, or t
  misc_feature (53)..(54): n is a, c, g, or t
tttttttaagcagtggtatcaacgcagagtacnncaaggatgnngagcatganntttttttttttttttttttttttttttttt

SEQ ID NO: 8807 - DNA, 84 bp, Artificial
  Barcode component
  misc_feature (33)..(34): n is a, c, g, or t
  misc_feature (43)..(44): n is a, c, g, or t
  misc_feature (53)..(54): n is a, c, g, or t
tttttttaagcagtggtatcaacgcagagtacnncaaggatgnntcgaagtcnntttttttttttttttttttttttttttttt

SEQ ID NO: 8808 - DNA, 84 bp, Artificial
  Barcode component
  misc_feature (33)..(34): n is a, c, g, or t
  misc_feature (43)..(44): n is a, c, g, or t
  misc_feature (53)..(54): n is a, c, g, or t
tttttttaagcagtggtatcaacgcagagtacnncaaggatgnnggtgaacanntttttttttttttttttttttttttttttt

SEQ ID NO: 8809 - DNA, 84 bp, Artificial
  Barcode component
  misc_feature (33)..(34): n is a, c, g, or t
  misc_feature (43)..(44): n is a, c, g, or t
  misc_feature (53)..(54): n is a, c, g, or t
tttttttaagcagtggtatcaacgcagagtacnncaaggatgnnacatgcacnntttttttttttttttttttttttttttttt

SEQ ID NO: 8810 - DNA, 84 bp, Artificial
  Barcode component
  misc_feature (33)..(34): n is a, c, g, or t
  misc_feature (43)..(44): n is a, c, g, or t
  misc_feature (53)..(54): n is a, c, g, or t
tttttttaagcagtggtatcaacgcagagtacnncaaggatgnnccaacagtnntttttttttttttttttttttttttttttt

SEQ ID NO: 8811 - DNA, 84 bp, Artificial
  Barcode component
  misc_feature (33)..(34): n is a, c, g, or t
  misc_feature (43)..(44): n is a, c, g, or t
  misc_feature (53)..(54): n is a, c, g, or t
tttttttaagcagtggtatcaacgcagagtacnncaaggatgnnagaacagcnntttttttttttttttttttttttttttttt

SEQ ID NO: 8812 - DNA, 84 bp, Artificial
  Barcode component
  misc_feature (33)..(34): n is a, c, g, or t
  misc_feature (43)..(44): n is a, c, g, or t
  misc_feature (53)..(54): n is a, c, g, or t
tttttttaagcagtggtatcaacgcagagtacnncaaggatgnngaacacgtnntttttttttttttttttttttttttttttt

SEQ ID NO: 8813 - DNA, 84 bp, Artificial
  Barcode component
  misc_feature (33)..(34): n is a, c, g, or t
  misc_feature (43)..(44): n is a, c, g, or t
  misc_feature (53)..(54): n is a, c, g, or t
tttttttaagcagtggtatcaacgcagagtacnncaaggatgnnggtcttcanntttttttttttttttttttttttttttttt

SEQ ID NO: 8814 - DNA, 84 bp, Artificial
  Barcode component
  misc_feature (33)..(34): n is a, c, g, or t
  misc_feature (43)..(44): n is a, c, g, or t
  misc_feature (53)..(54): n is a, c, g, or t
tttttttaagcagtggtatcaacgcagagtacnncaaggatgnnaggttcagnntttttttttttttttttttttttttttttt

SEQ ID NO: 8815 - DNA, 84 bp, Artificial
  Barcode component
  misc_feature (33)..(34): n is a, c, g, or t
  misc_feature (43)..(44): n is a, c, g, or t
  misc_feature (53)..(54): n is a, c, g, or t
tttttttaagcagtggtatcaacgcagagtacnncaaggatgnnctagagcanntttttttttttttttttttttttttttttt

SEQ ID NO: 8816 - DNA, 84 bp, Artificial
  Barcode component
  misc_feature (33)..(34): n is a, c, g, or t
  misc_feature (43)..(44): n is a, c, g, or t
  misc_feature (53)..(54): n is a, c, g, or t
tttttttaagcagtggtatcaacgcagagtacnncaaggatgnncttctagcnntttttttttttttttttttttttttttttt

SEQ ID NO: 8817 - DNA, 84 bp, Artificial
  Barcode component
  misc_feature (33)..(34): n is a, c, g, or t
  misc_feature (43)..(44): n is a, c, g, or t
  misc_feature (53)..(54): n is a, c, g, or t
tttttttaagcagtggtatcaacgcagagtacnncaaggatgnngagtaacgnntttttttttttttttttttttttttttttt

SEQ ID NO: 8818 - DNA, 84 bp, Artificial
  Barcode component
  misc_feature (33)..(34): n is a, c, g, or t
  misc_feature (43)..(44): n is a, c, g, or t
  misc_feature (53)..(54): n is a, c, g, or t
tttttttaagcagtggtatcaacgcagagtacnncaaggatgnnctaagaggnntttttttttttttttttttttttttttttt

SEQ ID NO: 8819 - DNA, 84 bp, Artificial
  Barcode component
  misc_feature (33)..(34): n is a, c, g, or t
  misc_feature (43)..(44): n is a, c, g, or t
  misc_feature (53)..(54): n is a, c, g, or t
tttttttaagcagtggtatcaacgcagagtacnncaaggatgnnacgtgtagnntttttttttttttttttttttttttttttt

SEQ ID NO: 8820 - DNA, 84 bp, Artificial
  Barcode component
  misc_feature (33)..(34): n is a, c, g, or t
  misc_feature (43)..(44): n is a, c, g, or t
  misc_feature (53)..(54): n is a, c, g, or t
tttttttaagcagtggtatcaacgcagagtacnncaaggatgnnactacaggnntttttttttttttttttttttttttttttt

SEQ ID NO: 8821 - DNA, 84 bp, Artificial
  Barcode component
  misc_feature (33)..(34): n is a, c, g, or t
  misc_feature (43)..(44): n is a, c, g, or t
  misc_feature (53)..(54): n is a, c, g, or t
tttttttaagcagtggtatcaacgcagagtacnncaaggatgnntacaggtcnntttttttttttttttttttttttttttttt

SEQ ID NO: 8822 - DNA, 84 bp, Artificial
  Barcode component
  misc_feature (33)..(34): n is a, c, g, or t
  misc_feature (43)..(44): n is a, c, g, or t
  misc_feature (53)..(54): n is a, c, g, or t
tttttttaagcagtggtatcaacgcagagtacnncaaggatgnnctcacatgnntttttttttttttttttttttttttttttt

SEQ ID NO: 8823 - DNA, 84 bp, Artificial
  Barcode component
  misc_feature (33)..(34): n is a, c, g, or t
  misc_feature (43)..(44): n is a, c, g, or t
  misc_feature (53)..(54): n is a, c, g, or t
tttttttaagcagtggtatcaacgcagagtacnncaaggatgnnactaggagnntttttttttttttttttttttttttttttt

SEQ ID NO: 8824 - DNA, 84 bp, Artificial
  Barcode component
  misc_feature (33)..(34): n is a, c, g, or t
  misc_feature (43)..(44): n is a, c, g, or t
  misc_feature (53)..(54): n is a, c, g, or t
tttttttaagcagtggtatcaacgcagagtacnncaaggatgnnccatagganntttttttttttttttttttttttttttttt

SEQ ID NO: 8825 - DNA, 84 bp, Artificial
  Barcode component
  misc_feature (33)..(34): n is a, c, g, or t
  misc_feature (43)..(44): n is a, c, g, or t
  misc_feature (53)..(54): n is a, c, g, or t
tttttttaagcagtggtatcaacgcagagtacnncaaggatgnnggagaatcnntttttttttttttttttttttttttttttt

SEQ ID NO: 8826 - DNA, 84 bp, Artificial
  Barcode component
  misc_feature (33)..(34): n is a, c, g, or t
  misc_feature (43)..(44): n is a, c, g, or t
  misc_feature (53)..(54): n is a, c, g, or t
tttttttaagcagtggtatcaacgcagagtacnncaaggatgnngccaagaanntttttttttttttttttttttttttttttt

SEQ ID NO: 8827 - DNA, 84 bp, Artificial
  Barcode component
  misc_feature (33)..(34): n is a, c, g, or t
  misc_feature (43)..(44): n is a, c, g, or t
  misc_feature (53)..(54): n is a, c, g, or t
tttttttaagcagtggtatcaacgcagagtacnncaaggatgnnaaggcaagnntttttttttttttttttttttttttttttt

SEQ ID NO: 8828 - DNA, 84 bp, Artificial
  Barcode component
  misc_feature (33)..(34): n is a, c, g, or t
  misc_feature (43)..(44): n is a, c, g, or t
  misc_feature (53)..(54): n is a, c, g, or t
tttttttaagcagtggtatcaacgcagagtacnncaaggatgnnaatgtcgcnntttttttttttttttttttttttttttttt

SEQ ID NO: 8829 - DNA, 84 bp, Artificial
  Barcode component
  misc_feature (33)..(34): n is a, c, g, or t
  misc_feature (43)..(44): n is a, c, g, or t
  misc_feature (53)..(54): n is a, c, g, or t
tttttttaagcagtggtatcaacgcagagtacnncaaggatgnnatggaaccnntttttttttttttttttttttttttttttt

SEQ ID NO: 8830 - DNA, 84 bp, Artificial
  Barcode component
  misc_feature (33)..(34): n is a, c, g, or t
  misc_feature (43)..(44): n is a, c, g, or t
  misc_feature (53)..(54): n is a, c, g, or t
tttttttaagcagtggtatcaacgcagagtacnncaaggatgnnagaggcatnntttttttttttttttttttttttttttttt

SEQ ID NO: 8831 - DNA, 84 bp, Artificial
  Barcode component
  misc_feature (33)..(34): n is a, c, g, or t
  misc_feature (43)..(44): n is a, c, g, or t
  misc_feature (53)..(54): n is a, c, g, or t
tttttttaagcagtggtatcaacgcagagtacnncaaggatgnntgcatagcnntttttttttttttttttttttttttttttt

SEQ ID NO: 8832 - DNA, 84 bp, Artificial
  Barcode component
  misc_feature (33)..(34): n is a, c, g, or t
  misc_feature (43)..(44): n is a, c, g, or t
  misc_feature (53)..(54): n is a, c, g, or t
tttttttaagcagtggtatcaacgcagagtacnncaaggatgnnctaacgganntttttttttttttttttttttttttttttt

SEQ ID NO: 8833 - DNA, 84 bp, Artificial
  Barcode component
  misc_feature (33)..(34): n is a, c, g, or t
  misc_feature (43)..(44): n is a, c, g, or t
  misc_feature (53)..(54): n is a, c, g, or t
tttttttaagcagtggtatcaacgcagagtacnncaaggatgnntatcgaggnntttttttttttttttttttttttttttttt

SEQ ID NO: 8834 - DNA, 84 bp, Artificial
  Barcode component
  misc_feature (33)..(34): n is a, c, g, or t
  misc_feature (43)..(44): n is a, c, g, or t
  misc_feature (53)..(54): n is a, c, g, or t
tttttttaagcagtggtatcaacgcagagtacnncaaggatgnncatagcctnntttttttttttttttttttttttttttttt

SEQ ID NO: 8835 - DNA, 84 bp, Artificial
  Barcode component
  misc_feature (33)..(34): n is a, c, g, or t
  misc_feature (43)..(44): n is a, c, g, or t
  misc_feature (53)..(54): n is a, c, g, or t
tttttttaagcagtggtatcaacgcagagtacnncaaggatgnnatcgagacnntttttttttttttttttttttttttttttt

SEQ ID NO: 8836 - DNA, 84 bp, Artificial
  Barcode component
  misc_feature (33)..(34): n is a, c, g, or t
  misc_feature (43)..(44): n is a, c, g, or t
  misc_feature (53)..(54): n is a, c, g, or t
tttttttaagcagtggtatcaacgcagagtacnncaaggatgnnggaagagtnntttttttttttttttttttttttttttttt

SEQ ID NO: 8837 - DNA, 84 bp, Artificial
  Barcode component
  misc_feature (33)..(34): n is a, c, g, or t
  misc_feature (43)..(44): n is a, c, g, or t
  misc_feature (53)..(54): n is a, c, g, or t
tttttttaagcagtggtatcaacgcagagtacnncaaggatgnnccaagtagnntttttttttttttttttttttttttttttt

SEQ ID NO: 8838 - DNA, 84 bp, Artificial
  Barcode component
  misc_feature (33)..(34): n is a, c, g, or t
  misc_feature (43)..(44): n is a, c, g, or t
  misc_feature (53)..(54): n is a, c, g, or t
tttttttaagcagtggtatcaacgcagagtacnncaaggatgnnctgaacagnntttttttttttttttttttttttttttttt

SEQ ID NO: 8839 - DNA, 84 bp, Artificial
  Barcode component
  misc_feature (33)..(34): n is a, c, g, or t
  misc_feature (43)..(44): n is a, c, g, or t
  misc_feature (53)..(54): n is a, c, g, or t
tttttttaagcagtggtatcaacgcagagtacnncaaggatgnngtaggttcnntttttttttttttttttttttttttttttt

SEQ ID NO: 8840 - DNA, 84 bp, Artificial
  Barcode component
  misc_feature (33)..(34): n is a, c, g, or t
  misc_feature (43)..(44): n is a, c, g, or t
  misc_feature (53)..(54): n is a, c, g, or t
tttttttaagcagtggtatcaacgcagagtacnncaaggatgnngtatggacnntttttttttttttttttttttttttttttt

SEQ ID NO: 8841 - DNA, 84 bp, Artificial
  Barcode component
  misc_feature (33)..(34): n is a, c, g, or t
  misc_feature (43)..(44): n is a, c, g, or t
  misc_feature (53)..(54): n is a, c, g, or t
tttttttaagcagtggtatcaacgcagagtacnncaaggatgnntcgcaacanntttttttttttttttttttttttttttttt

SEQ ID NO: 8842 - DNA, 84 bp, Artificial
  Barcode component
  misc_feature (33)..(34): n is a, c, g, or t
  misc_feature (43)..(44): n is a, c, g, or t
  misc_feature (53)..(54): n is a, c, g, or t
tttttttaagcagtggtatcaacgcagagtacnncaaggatgnnccgctaatnntttttttttttttttttttttttttttttt

SEQ ID NO: 8843 - DNA, 84 bp, Artificial
  Barcode component
  misc_feature (33)..(34): n is a, c, g, or t
  misc_feature (43)..(44): n is a, c, g, or t
  misc_feature (53)..(54): n is a, c, g, or t
tttttttaagcagtggtatcaacgcagagtacnncaaggatgnngattcgcanntttttttttttttttttttttttttttttt

SEQ ID NO: 8844 - DNA, 84 bp, Artificial
  Barcode component
  misc_feature (33)..(34): n is a, c, g, or t
  misc_feature (43)..(44): n is a, c, g, or t
  misc_feature (53)..(54): n is a, c, g, or t
tttttttaagcagtggtatcaacgcagagtacnncaaggatgnncgatggaanntttttttttttttttttttttttttttttt

SEQ ID NO: 8845 - DNA, 84 bp, Artificial
  Barcode component
  misc_feature (33)..(34): n is a, c, g, or t
  misc_feature (43)..(44): n is a, c, g, or t
  misc_feature (53)..(54): n is a, c, g, or t
tttttttaagcagtggtatcaacgcagagtacnncaaggatgnnagcaagganntttttttttttttttttttttttttttttt

SEQ ID NO: 8846 - DNA, 84 bp, Artificial
  Barcode component
  misc_feature (33)..(34): n is a, c, g, or t
  misc_feature (43)..(44): n is a, c, g, or t
  misc_feature (53)..(54): n is a, c, g, or t
tttttttaagcagtggtatcaacgcagagtacnncaaggatgnncgtagcaanntttttttttttttttttttttttttttttt

SEQ ID NO: 8847 - DNA, 84 bp, Artificial
  Barcode component
  misc_feature (33)..(34): n is a, c, g, or t
  misc_feature (43)..(44): n is a, c, g, or t
  misc_feature (53)..(54): n is a, c, g, or t
tttttttaagcagtggtatcaacgcagagtacnncaaggatgnntggcagtanntttttttttttttttttttttttttttttt

SEQ ID NO: 8848 - DNA, 84 bp, Artificial
  Barcode component
  misc_feature (33)..(34): n is a, c, g, or t
  misc_feature (43)..(44): n is a, c, g, or t
  misc_feature (53)..(54): n is a, c, g, or t
tttttttaagcagtggtatcaacgcagagtacnncaaggatgnncggtagttnntttttttttttttttttttttttttttttt

SEQ ID NO: 8849 - DNA, 84 bp, Artificial
  Barcode component
  misc_feature (33)..(34): n is a, c, g, or t
  misc_feature (43)..(44): n is a, c, g, or t
  misc_feature (53)..(54): n is a, c, g, or t
tttttttaagcagtggtatcaacgcagagtacnncaaggatgnntgacttcgnntttttttttttttttttttttttttttttt

SEQ ID NO: 8850 - DNA, 84 bp, Artificial
  Barcode component
  misc_feature (33)..(34): n is a, c, g, or t
  misc_feature (43)..(44): n is a, c, g, or t
  misc_feature (53)..(54): n is a, c, g, or t
tttttttaagcagtggtatcaacgcagagtacnncaaggatgnngagtgcaanntttttttttttttttttttttttttttttt

SEQ ID NO: 8851 - DNA, 84 bp, Artificial
  Barcode component
  misc_feature (33)..(34): n is a, c, g, or t
  misc_feature (43)..(44): n is a, c, g, or t
  misc_feature (53)..(54): n is a, c, g, or t
tttttttaagcagtggtatcaacgcagagtacnncaaggatgnnacggtaacnntttttttttttttttttttttttttttttt

SEQ ID NO: 8852 - DNA, 84 bp, Artificial
  Barcode component
  misc_feature (33)..(34): n is a, c, g, or t
  misc_feature (43)..(44): n is a, c, g, or t
  misc_feature (53)..(54): n is a, c, g, or t
tttttttaagcagtggtatcaacgcagagtacnncaaggatgnnaagtggtgnntttttttttttttttttttttttttttttt

SEQ ID NO: 8853 - DNA, 84 bp, Artificial
  Barcode component
  misc_feature (33)..(34): n is a, c, g, or t
  misc_feature (43)..(44): n is a, c, g, or t
  misc_feature (53)..(54): n is a, c, g, or t
tttttttaagcagtggtatcaacgcagagtacnncaaggatgnnggagacaanntttttttttttttttttttttttttttttt

SEQ ID NO: 8854 - DNA, 84 bp, Artificial
  Barcode component
  misc_feature (33)..(34): n is a, c, g, or t
  misc_feature (43)..(44): n is a, c, g, or t
  misc_feature (53)..(54): n is a, c, g, or t
tttttttaagcagtggtatcaacgcagagtacnncaaggatgnntcaaggacnntttttttttttttttttttttttttttttt

SEQ ID NO: 8855 - DNA, 84 bp, Artificial
  Barcode component
  misc_feature (33)..(34): n is a, c, g, or t
  misc_feature (43)..(44): n is a, c, g, or t
  misc_feature (53)..(54): n is a, c, g, or t
tttttttaagcagtggtatcaacgcagagtacnncaaggatgnnaagagagcnntttttttttttttttttttttttttttttt

SEQ ID NO: 8856 - DNA, 84 bp, Artificial
  Barcode component
  misc_feature (33)..(34): n is a, c, g, or t
  misc_feature (43)..(44): n is a, c, g, or t
  misc_feature (53)..(54): n is a, c, g, or t
tttttttaagcagtggtatcaacgcagagtacnncaaggatgnncgagagatnntttttttttttttttttttttttttttttt

SEQ ID NO: 8857 - DNA, 84 bp, Artificial
  Barcode component
  misc_feature (33)..(34): n is a, c, g, or t
  misc_feature (43)..(44): n is a, c, g, or t
  misc_feature (53)..(54): n is a, c, g, or t
tttttttaagcagtggtatcaacgcagagtacnncaaggatgnnacagatggnntttttttttttttttttttttttttttttt

SEQ ID NO: 8858 - DNA, 84 bp, Artificial
  Barcode component
  misc_feature (33)..(34): n is a, c, g, or t
  misc_feature (43)..(44): n is a, c, g, or t
  misc_feature (53)..(54): n is a, c, g, or t
tttttttaagcagtggtatcaacgcagagtacnncaaggatgnnaggagtcanntttttttttttttttttttttttttttttt

SEQ ID NO: 8859 - DNA, 84 bp, Artificial
  Barcode component
  misc_feature (33)..(34): n is a, c, g, or t
  misc_feature (43)..(44): n is a, c, g, or t
  misc_feature (53)..(54): n is a, c, g, or t
tttttttaagcagtggtatcaacgcagagtacnncaaggatgnncgtgttacnntttttttttttttttttttttttttttttt

SEQ ID NO: 8860 - DNA, 84 bp, Artificial
  Barcode component
  misc_feature (33)..(34): n is a, c, g, or t
  misc_feature (43)..(44): n is a, c, g, or t
  misc_feature (53)..(54): n is a, c, g, or t
tttttttaagcagtggtatcaacgcagagtacnncaaggatgnntagtgtgcnntttttttttttttttttttttttttttttt

SEQ ID NO: 8861 - DNA, 84 bp, Artificial
  Barcode component
  misc_feature (33)..(34): n is a, c, g, or t
  misc_feature (43)..(44): n is a, c, g, or t
  misc_feature (53)..(54): n is a, c, g, or t
tttttttaagcagtggtatcaacgcagagtacnncaaggatgnnctcatgacnntttttttttttttttttttttttttttttt

SEQ ID NO: 8862 - DNA, 84 bp, Artificial
  Barcode component
  misc_feature (33)..(34): n is a, c, g, or t
  misc_feature (43)..(44): n is a, c, g, or t
  misc_feature (53)..(54): n is a, c, g, or t
tttttttaagcagtggtatcaacgcagagtacnncaaggatgnngtatccagnntttttttttttttttttttttttttttttt

SEQ ID NO: 8863 - DNA, 84 bp, Artificial
  Barcode component
  misc_feature (33)..(34): n is a, c, g, or t
  misc_feature (43)..(44): n is a, c, g, or t
  misc_feature (53)..(54): n is a, c, g, or t
tttttttaagcagtggtatcaacgcagagtacnncaaggatgnnacgcctatnntttttttttttttttttttttttttttttt

SEQ ID NO: 8864 - DNA, 84 bp, Artificial
  Barcode component
  misc_feature (33)..(34): n is a, c, g, or t
  misc_feature (43)..(44): n is a, c, g, or t
  misc_feature (53)..(54): n is a, c, g, or t
tttttttaagcagtggtatcaacgcagagtacnncaaggatgnnaacgacctnntttttttttttttttttttttttttttttt

SEQ ID NO: 8865 - DNA, 84 bp, Artificial
  Barcode component
  misc_feature (33)..(34): n is a, c, g, or t
  misc_feature (43)..(44): n is a, c, g, or t
  misc_feature (53)..(54): n is a, c, g, or t
tttttttaagcagtggtatcaacgcagagtacnncaaggatgnnatcaggctnntttttttttttttttttttttttttttttt

SEQ ID NO: 8866 - DNA, 84 bp, Artificial
  Barcode component
  misc_feature (33)..(34): n is a, c, g, or t
  misc_feature (43)..(44): n is a, c, g, or t
  misc_feature (53)..(54): n is a, c, g, or t
tttttttaagcagtggtatcaacgcagagtacnncaaggatgnncaagttcgnntttttttttttttttttttttttttttttt

SEQ ID NO: 8867 - DNA, 84 bp, Artificial
  Barcode component
  misc_feature (33)..(34): n is a, c, g, or t
  misc_feature (43)..(44): n is a, c, g, or t
  misc_feature (53)..(54): n is a, c, g, or t
tttttttaagcagtggtatcaacgcagagtacnncaaggatgnntagccaganntttttttttttttttttttttttttttttt

SEQ ID NO: 8868 - DNA, 84 bp, Artificial
  Barcode component
  misc_feature (33)..(34): n is a, c, g, or t
  misc_feature (43)..(44): n is a, c, g, or t
  misc_feature (53)..(54): n is a, c, g, or t
tttttttaagcagtggtatcaacgcagagtacnncaaggatgnncaatcacgnntttttttttttttttttttttttttttttt

SEQ ID NO: 8869 - DNA, 84 bp, Artificial
  Barcode component
  misc_feature (33)..(34): n is a, c, g, or t
  misc_feature (43)..(44): n is a, c, g, or t
  misc_feature (53)..(54): n is a, c, g, or t
tttttttaagcagtggtatcaacgcagagtacnncaaggatgnngcaacaagnntttttttttttttttttttttttttttttt

SEQ ID NO: 8870 - DNA, 84 bp, Artificial
  Barcode component
  misc_feature (33)..(34): n is a, c, g, or t
  misc_feature (43)..(44): n is a, c, g, or t
  misc_feature (53)..(54): n is a, c, g, or t
tttttttaagcagtggtatcaacgcagagtacnncaaggatgnncacgacaanntttttttttttttttttttttttttttttt

SEQ ID NO: 8871 - DNA, 84 bp, Artificial
  Barcode component
  misc_feature (33)..(34): n is a, c, g, or t
  misc_feature (43)..(44): n is a, c, g, or t
  misc_feature (53)..(54): n is a, c, g, or t
tttttttaagcagtggtatcaacgcagagtacnncaaggatgnntacggaganntttttttttttttttttttttttttttttt

SEQ ID NO: 8872 - DNA, 84 bp, Artificial
  Barcode component
  misc_feature (33)..(34): n is a, c, g, or t
  misc_feature (43)..(44): n is a, c, g, or t
  misc_feature (53)..(54): n is a, c, g, or t
tttttttaagcagtggtatcaacgcagagtacnncaaggatgnncgacaaganntttttttttttttttttttttttttttttt

SEQ ID NO: 8873 - DNA, 84 bp, Artificial
  Barcode component
  misc_feature (33)..(34): n is a, c, g, or t
  misc_feature (43)..(44): n is a, c, g, or t
  misc_feature (53)..(54): n is a, c, g, or t
tttttttaagcagtggtatcaacgcagagtacnncaaggatgnncgaagtganntttttttttttttttttttttttttttttt

SEQ ID NO: 8874 - DNA, 84 bp, Artificial
  Barcode component
  misc_feature (33)..(34): n is a, c, g, or t
  misc_feature (43)..(44): n is a, c, g, or t
  misc_feature (53)..(54): n is a, c, g, or t
tttttttaagcagtggtatcaacgcagagtacnncaaggatgnnagctggtanntttttttttttttttttttttttttttttt

SEQ ID NO: 8875 - DNA, 84 bp, Artificial
  Barcode component
  misc_feature (33)..(34): n is a, c, g, or t
  misc_feature (43)..(44): n is a, c, g, or t
  misc_feature (53)..(54): n is a, c, g, or t
tttttttaagcagtggtatcaacgcagagtacnncaaggatgnnaactaggcnntttttttttttttttttttttttttttttt

SEQ ID NO: 8876 - DNA, 84 bp, Artificial
  Barcode component
  misc_feature (33)..(34): n is a, c, g, or t
  misc_feature (43)..(44): n is a, c, g, or t
  misc_feature (53)..(54): n is a, c, g, or t
tttttttaagcagtggtatcaacgcagagtacnncaaggatgnncagcaagtnntttttttttttttttttttttttttttttt

SEQ ID NO: 8877 - DNA, 84 bp, Artificial
  Barcode component
  misc_feature (33)..(34): n is a, c, g, or t
  misc_feature (43)..(44): n is a, c, g, or t
  misc_feature (53)..(54): n is a, c, g, or t
tttttttaagcagtggtatcaacgcagagtacnncaaggatgnnacgaggtanntttttttttttttttttttttttttttttt

SEQ ID NO: 8878 - DNA, 84 bp, Artificial
  Barcode component
  misc_feature (33)..(34): n is a, c, g, or t
  misc_feature (43)..(44): n is a, c, g, or t
  misc_feature (53)..(54): n is a, c, g, or t
tttttttaagcagtggtatcaacgcagagtacnncaaggatgnncatcttccnntttttttttttttttttttttttttttttt

SEQ ID NO: 8879 - DNA, 84 bp, Artificial
  Barcode component
  misc_feature (33)..(34): n is a, c, g, or t
  misc_feature (43)..(44): n is a, c, g, or t
  misc_feature (53)..(54): n is a, c, g, or t
tttttttaagcagtggtatcaacgcagagtacnncaaggatgnncctgaatcnntttttttttttttttttttttttttttttt

SEQ ID NO: 8880 - DNA, 84 bp, Artificial
  Barcode component
  misc_feature (33)..(34): n is a, c, g, or t
  misc_feature (43)..(44): n is a, c, g, or t
  misc_feature (53)..(54): n is a, c, g, or t
tttttttaagcagtggtatcaacgcagagtacnncaaggatgnntgcagactnntttttttttttttttttttttttttttttt

SEQ ID NO: 8881 - DNA, 84 bp, Artificial
  Barcode component
  misc_feature (33)..(34): n is a, c, g, or t
  misc_feature (43)..(44): n is a, c, g, or t
  misc_feature (53)..(54): n is a, c, g, or t
tttttttaagcagtggtatcaacgcagagtacnncaaggatgnnagatgtggnntttttttttttttttttttttttttttttt

SEQ ID NO: 8882 - DNA, 84 bp, Artificial
  Barcode component
  misc_feature (33)..(34): n is a, c, g, or t
  misc_feature (43)..(44): n is a, c, g, or t
  misc_feature (53)..(54): n is a, c, g, or t
tttttttaagcagtggtatcaacgcagagtacnncaaggatgnnagttcgacnntttttttttttttttttttttttttttttt

SEQ ID NO: 8883 - DNA, 84 bp, Artificial
  Barcode component
  misc_feature (33)..(34): n is a, c, g, or t
  misc_feature (43)..(44): n is a, c, g, or t
  misc_feature (53)..(54): n is a, c, g, or t
tttttttaagcagtggtatcaacgcagagtacnncaaggatgnnacaacctcnntttttttttttttttttttttttttttttt

SEQ ID NO: 8884 - DNA, 84 bp, Artificial
  Barcode component
  misc_feature (33)..(34): n is a, c, g, or t
  misc_feature (43)..(44): n is a, c, g, or t
  misc_feature (53)..(54): n is a, c, g, or t
tttttttaagcagtggtatcaacgcagagtacnncaaggatgnncatggtagnntttttttttttttttttttttttttttttt

SEQ ID NO: 8885 - DNA, 84 bp, Artificial
  Barcode component
  misc_feature (33)..(34): n is a, c, g, or t
  misc_feature (43)..(44): n is a, c, g, or t
  misc_feature (53)..(54): n is a, c, g, or t
tttttttaagcagtggtatcaacgcagagtacnncaaggatgnncgtatctcnntttttttttttttttttttttttttttttt

SEQ ID NO: 8886 - DNA, 84 bp, Artificial
  Barcode component
  misc_feature (33)..(34): n is a, c, g, or t
  misc_feature (43)..(44): n is a, c, g, or t
  misc_feature (53)..(54): n is a, c, g, or t
tttttttaagcagtggtatcaacgcagagtacnncaaggatgnncctagttcnntttttttttttttttttttttttttttttt

SEQ ID NO: 8887 - DNA, 84 bp, Artificial
  Barcode component
  misc_feature (33)..(34): n is a, c, g, or t
  misc_feature (43)..(44): n is a, c, g, or t
  misc_feature (53)..(54): n is a, c, g, or t
tttttttaagcagtggtatcaacgcagagtacnncaaggatgnncaagagtcnntttttttttttttttttttttttttttttt

SEQ ID NO: 8888 - DNA, 84 bp, Artificial
  Barcode component
  misc_feature (33)..(34): n is a, c, g, or t
  misc_feature (43)..(44): n is a, c, g, or t
  misc_feature (53)..(54): n is a, c, g, or t
tttttttaagcagtggtatcaacgcagagtacnntcagaaccnnaatcggcanntttttttttttttttttttttttttttttt

SEQ ID NO: 8889 - DNA, 84 bp, Artificial
  Barcode component
  misc_feature (33)..(34): n is a, c, g, or t
  misc_feature (43)..(44): n is a, c, g, or t
  misc_feature (53)..(54): n is a, c, g, or t
tttttttaagcagtggtatcaacgcagagtacnntcagaaccnntacggcatnntttttttttttttttttttttttttttttt

SEQ ID NO: 8890 - DNA, 84 bp, Artificial
  Barcode component
  misc_feature (33)..(34): n is a, c, g, or t
  misc_feature (43)..(44): n is a, c, g, or t
  misc_feature (53)..(54): n is a, c, g, or t
tttttttaagcagtggtatcaacgcagagtacnntcagaaccnnttggatcgnntttttttttttttttttttttttttttttt

SEQ ID NO: 8891 - DNA, 84 bp, Artificial
  Barcode component
  misc_feature (33)..(34): n is a, c, g, or t
  misc_feature (43)..(44): n is a, c, g, or t
  misc_feature (53)..(54): n is a, c, g, or t
tttttttaagcagtggtatcaacgcagagtacnntcagaaccnntggaacganntttttttttttttttttttttttttttttt

SEQ ID NO: 8892 - DNA, 84 bp, Artificial
  Barcode component
  misc_feature (33)..(34): n is a, c, g, or t
  misc_feature (43)..(44): n is a, c, g, or t
  misc_feature (53)..(54): n is a, c, g, or t
tttttttaagcagtggtatcaacgcagagtacnntcagaaccnnggcaatcanntttttttttttttttttttttttttttttt

SEQ ID NO: 8893 - DNA, 84 bp, Artificial
  Barcode component
  misc_feature (33)..(34): n is a, c, g, or t
  misc_feature (43)..(44): n is a, c, g, or t
  misc_feature (53)..(54): n is a, c, g, or t
tttttttaagcagtggtatcaacgcagagtacnntcagaaccnngaatccganntttttttttttttttttttttttttttttt

SEQ ID NO: 8894 - DNA, 84 bp, Artificial
  Barcode component
  misc_feature (33)..(34): n is a, c, g, or t
  misc_feature (43)..(44): n is a, c, g, or t
  misc_feature (53)..(54): n is a, c, g, or t
tttttttaagcagtggtatcaacgcagagtacnntcagaaccnnttacggtgnntttttttttttttttttttttttttttttt

SEQ ID NO: 8895 - DNA, 84 bp, Artificial
  Barcode component
  misc_feature (33)..(34): n is a, c, g, or t
  misc_feature (43)..(44): n is a, c, g, or t
  misc_feature (53)..(54): n is a, c, g, or t
tttttttaagcagtggtatcaacgcagagtacnntcagaaccnncatatcggnntttttttttttttttttttttttttttttt

SEQ ID NO: 8896 - DNA, 84 bp, Artificial
  Barcode component
  misc_feature (33)..(34): n is a, c, g, or t
  misc_feature (43)..(44): n is a, c, g, or t
  misc_feature (53)..(54): n is a, c, g, or t
tttttttaagcagtggtatcaacgcagagtacnntcagaaccnncttcggtanntttttttttttttttttttttttttttttt

SEQ ID NO: 8897 - DNA, 84 bp, Artificial
  Barcode component
  misc_feature (33)..(34): n is a, c, g, or t
  misc_feature (43)..(44): n is a, c, g, or t
  misc_feature (53)..(54): n is a, c, g, or t
tttttttaagcagtggtatcaacgcagagtacnntcagaaccnntcctaacgnntttttttttttttttttttttttttttttt

SEQ ID NO: 8898 - DNA, 84 bp, Artificial
  Barcode component
  misc_feature (33)..(34): n is a, c, g, or t
  misc_feature (43)..(44): n is a, c, g, or t
  misc_feature (53)..(54): n is a, c, g, or t
tttttttaagcagtggtatcaacgcagagtacnntcagaaccnngtaagccanntttttttttttttttttttttttttttttt

SEQ ID NO: 8899 - DNA, 84 bp, Artificial
  Barcode component
  misc_feature (33)..(34): n is a, c, g, or t
  misc_feature (43)..(44): n is a, c, g, or t
  misc_feature (53)..(54): n is a, c, g, or t
tttttttaagcagtggtatcaacgcagagtacnntcagaaccnntaaggtggnntttttttttttttttttttttttttttttt

SEQ ID NO: 8900 - DNA, 84 bp, Artificial
  Barcode component
  misc_feature (33)..(34): n is a, c, g, or t
  misc_feature (43)..(44): n is a, c, g, or t
  misc_feature (53)..(54): n is a, c, g, or t
tttttttaagcagtggtatcaacgcagagtacnntcagaaccnnggtaagctnntttttttttttttttttttttttttttttt

SEQ ID NO: 8901 - DNA, 84 bp, Artificial
  Barcode component
  misc_feature (33)..(34): n is a, c, g, or t
  misc_feature (43)..(44): n is a, c, g, or t
  misc_feature (53)..(54): n is a, c, g, or t
tttttttaagcagtggtatcaacgcagagtacnntcagaaccnntgtgtcganntttttttttttttttttttttttttttttt

SEQ ID NO: 8902 - DNA, 84 bp, Artificial
  Barcode component
  misc_feature (33)..(34): n is a, c, g, or t
  misc_feature (43)..(44): n is a, c, g, or t
  misc_feature (53)..(54): n is a, c, g, or t
tttttttaagcagtggtatcaacgcagagtacnntcagaaccnngagcatganntttttttttttttttttttttttttttttt

SEQ ID NO: 8903 - DNA, 84 bp, Artificial
  Barcode component
  misc_feature (33)..(34): n is a, c, g, or t
  misc_feature (43)..(44): n is a, c, g, or t
  misc_feature (53)..(54): n is a, c, g, or t
tttttttaagcagtggtatcaacgcagagtacnntcagaaccnntcgaagtcnntttttttttttttttttttttttttttttt

SEQ ID NO: 8904 - DNA, 84 bp, Artificial
  Barcode component
  misc_feature (33)..(34): n is a, c, g, or t
  misc_feature (43)..(44): n is a, c, g, or t
  misc_feature (53)..(54): n is a, c, g, or t
tttttttaagcagtggtatcaacgcagagtacnntcagaaccnnggtgaacanntttttttttttttttttttttttttttttt

SEQ ID NO: 8905 - DNA, 84 bp, Artificial
  Barcode component
  misc_feature (33)..(34): n is a, c, g, or t
  misc_feature (43)..(44): n is a, c, g, or t
  misc_feature (53)..(54): n is a, c, g, or t
tttttttaagcagtggtatcaacgcagagtacnntcagaaccnnacatgcacnntttttttttttttttttttttttttttttt

SEQ ID NO: 8906 - DNA, 84 bp, Artificial
  Barcode component
  misc_feature (33)..(34): n is a, c, g, or t
  misc_feature (43)..(44): n is a, c, g, or t
  misc_feature (53)..(54): n is a, c, g, or t
tttttttaagcagtggtatcaacgcagagtacnntcagaaccnnccaacagtnntttttttttttttttttttttttttttttt

SEQ ID NO: 8907 - DNA, 84 bp, Artificial
  Barcode component
  misc_feature (33)..(34): n is a, c, g, or t
  misc_feature (43)..(44): n is a, c, g, or t
  misc_feature (53)..(54): n is a, c, g, or t
tttttttaagcagtggtatcaacgcagagtacnntcagaaccnnagaacagcnntttttttttttttttttttttttttttttt

SEQ ID NO: 8908 - DNA, 84 bp, Artificial
  Barcode component
  misc_feature (33)..(34): n is a, c, g, or t
  misc_feature (43)..(44): n is a, c, g, or t
  misc_feature (53)..(54): n is a, c, g, or t
tttttttaagcagtggtatcaacgcagagtacnntcagaaccnngaacacgtnntttttttttttttttttttttttttttttt

SEQ ID NO: 8909 - DNA, 84 bp, Artificial
  Barcode component
  misc_feature (33)..(34): n is a, c, g, or t
  misc_feature (43)..(44): n is a, c, g, or t
  misc_feature (53)..(54): n is a, c, g, or t
tttttttaagcagtggtatcaacgcagagtacnntcagaaccnnggtcttcanntttttttttttttttttttttttttttttt

SEQ ID NO: 8910 - DNA, 84 bp, Artificial
  Barcode component
  misc_feature (33)..(34): n is a, c, g, or t
  misc_feature (43)..(44): n is a, c, g, or t
  misc_feature (53)..(54): n is a, c, g, or t
tttttttaagcagtggtatcaacgcagagtacnntcagaaccnnaggttcagnntttttttttttttttttttttttttttttt

SEQ ID NO: 8911 - DNA, 84 bp, Artificial
  Barcode component
  misc_feature (33)..(34): n is a, c, g, or t
  misc_feature (43)..(44): n is a, c, g, or t
  misc_feature (53)..(54): n is a, c, g, or t
tttttttaagcagtggtatcaacgcagagtacnntcagaaccnnctagagcanntttttttttttttttttttttttttttttt

SEQ ID NO: 8912 - DNA, 84 bp, Artificial
  Barcode component
  misc_feature (33)..(34): n is a, c, g, or t
  misc_feature (43)..(44): n is a, c, g, or t
  misc_feature (53)..(54): n is a, c, g, or t
tttttttaagcagtggtatcaacgcagagtacnntcagaaccnncttctagcnntttttttttttttttttttttttttttttt

SEQ ID NO: 8913 - DNA, 84 bp, Artificial
  Barcode component
  misc_feature (33)..(34): n is a, c, g, or t
  misc_feature (43)..(44): n is a, c, g, or t
  misc_feature (53)..(54): n is a, c, g, or t
tttttttaagcagtggtatcaacgcagagtacnntcagaaccnngagtaacgnntttttttttttttttttttttttttttttt

SEQ ID NO: 8914 - DNA, 84 bp, Artificial
  Barcode component
  misc_feature (33)..(34): n is a, c, g, or t
  misc_feature (43)..(44): n is a, c, g, or t
  misc_feature (53)..(54): n is a, c, g, or t
tttttttaagcagtggtatcaacgcagagtacnntcagaaccnnctaagaggnntttttttttttttttttttttttttttttt

SEQ ID NO: 8915 - DNA, 84 bp, Artificial
  Barcode component
  misc_feature (33)..(34): n is a, c, g, or t
  misc_feature (43)..(44): n is a, c, g, or t
  misc_feature (53)..(54): n is a, c, g, or t
tttttttaagcagtggtatcaacgcagagtacnntcagaaccnnacgtgtagnntttttttttttttttttttttttttttttt

SEQ ID NO: 8916 - DNA, 84 bp, Artificial
  Barcode component
  misc_feature (33)..(34): n is a, c, g, or t
  misc_feature (43)..(44): n is a, c, g, or t
  misc_feature (53)..(54): n is a, c, g, or t
tttttttaagcagtggtatcaacgcagagtacnntcagaaccnnactacaggnntttttttttttttttttttttttttttttt

SEQ ID NO: 8917 - DNA, 84 bp, Artificial
  Barcode component
  misc_feature (33)..(34): n is a, c, g, or t
  misc_feature (43)..(44): n is a, c, g, or t
  misc_feature (53)..(54): n is a, c, g, or t
tttttttaagcagtggtatcaacgcagagtacnntcagaaccnntacaggtcnntttttttttttttttttttttttttttttt

SEQ ID NO: 8918 - DNA, 84 bp, Artificial
  Barcode component
  misc_feature (33)..(34): n is a, c, g, or t
  misc_feature (43)..(44): n is a, c, g, or t
  misc_feature (53)..(54): n is a, c, g, or t
tttttttaagcagtggtatcaacgcagagtacnntcagaaccnnctcacatgnntttttttttttttttttttttttttttttt

SEQ ID NO: 8919 - DNA, 84 bp, Artificial
  Barcode component
  misc_feature (33)..(34): n is a, c, g, or t
  misc_feature (43)..(44): n is a, c, g, or t
  misc_feature (53)..(54): n is a, c, g, or t
tttttttaagcagtggtatcaacgcagagtacnntcagaaccnnactaggagnntttttttttttttttttttttttttttttt

SEQ ID NO: 8920 - DNA, 84 bp, Artificial
  Barcode component
  misc_feature (33)..(34): n is a, c, g, or t
  misc_feature (43)..(44): n is a, c, g, or t
  misc_feature (53)..(54): n is a, c, g, or t
tttttttaagcagtggtatcaacgcagagtacnntcagaaccnnccatagganntttttttttttttttttttttttttttttt

SEQ ID NO: 8921 - DNA, 84 bp, Artificial
  Barcode component
  misc_feature (33)..(34): n is a, c, g, or t
  misc_feature (43)..(44): n is a, c, g, or t
  misc_feature (53)..(54): n is a, c, g, or t
tttttttaagcagtggtatcaacgcagagtacnntcagaaccnnggagaatcnntttttttttttttttttttttttttttttt

SEQ ID NO: 8922 - DNA, 84 bp, Artificial
  Barcode component
  misc_feature (33)..(34): n is a, c, g, or t
  misc_feature (43)..(44): n is a, c, g, or t
  misc_feature (53)..(54): n is a, c, g, or t
tttttttaagcagtggtatcaacgcagagtacnntcagaaccnngccaagaanntttttttttttttttttttttttttttttt

SEQ ID NO: 8923 - DNA, 84 bp, Artificial
  Barcode component
  misc_feature (33)..(34): n is a, c, g, or t
  misc_feature (43)..(44): n is a, c, g, or t
  misc_feature (53)..(54): n is a, c, g, or t
tttttttaagcagtggtatcaacgcagagtacnntcagaaccnnaaggcaagnntttttttttttttttttttttttttttttt

SEQ ID NO: 8924 - DNA, 84 bp, Artificial
  Barcode component
  misc_feature (33)..(34): n is a, c, g, or t
  misc_feature (43)..(44): n is a, c, g, or t
  misc_feature (53)..(54): n is a, c, g, or t
tttttttaagcagtggtatcaacgcagagtacnntcagaaccnnaatgtcgcnntttttttttttttttttttttttttttttt

SEQ ID NO: 8925 - DNA, 84 bp, Artificial
  Barcode component
  misc_feature (33)..(34): n is a, c, g, or t
  misc_feature (43)..(44): n is a, c, g, or t
  misc_feature (53)..(54): n is a, c, g, or t
tttttttaagcagtggtatcaacgcagagtacnntcagaaccnnatggaaccnntttttttttttttttttttttttttttttt

SEQ ID NO: 8926 - DNA, 84 bp, Artificial
  Barcode component
  misc_feature (33)..(34): n is a, c, g, or t
  misc_feature (43)..(44): n is a, c, g, or t
  misc_feature (53)..(54): n is a, c, g, or t
tttttttaagcagtggtatcaacgcagagtacnntcagaaccnnagaggcatnntttttttttttttttttttttttttttttt

SEQ ID NO: 8927 - DNA, 84 bp, Artificial
  Barcode component
  misc_feature (33)..(34): n is a, c, g, or t
  misc_feature (43)..(44): n is a, c, g, or t
  misc_feature (53)..(54): n is a, c, g, or t
tttttttaagcagtggtatcaacgcagagtacnntcagaaccnntgcatagcnntttttttttttttttttttttttttttttt

SEQ ID NO: 8928 - DNA, 84 bp, Artificial
  Barcode component
  misc_feature (33)..(34): n is a, c, g, or t
  misc_feature (43)..(44): n is a, c, g, or t
  misc_feature (53)..(54): n is a, c, g, or t
tttttttaagcagtggtatcaacgcagagtacnntcagaaccnnctaacgganntttttttttttttttttttttttttttttt

SEQ ID NO: 8929 - DNA, 84 bp, Artificial
  Barcode component
  misc_feature (33)..(34): n is a, c, g, or t
  misc_feature (43)..(44): n is a, c, g, or t
  misc_feature (53)..(54): n is a, c, g, or t
tttttttaagcagtggtatcaacgcagagtacnntcagaaccnntatcgaggnntttttttttttttttttttttttttttttt

SEQ ID NO: 8930 - DNA, 84 bp, Artificial
  Barcode component
  misc_feature (33)..(34): n is a, c, g, or t
  misc_feature (43)..(44): n is a, c, g, or t
  misc_feature (53)..(54): n is a, c, g, or t
tttttttaagcagtggtatcaacgcagagtacnntcagaaccnncatagcctnntttttttttttttttttttttttttttttt

SEQ ID NO: 8931 - DNA, 84 bp, Artificial
  Barcode component
  misc_feature (33)..(34): n is a, c, g, or t
  misc_feature (43)..(44): n is a, c, g, or t
  misc_feature (53)..(54): n is a, c, g, or t
tttttttaagcagtggtatcaacgcagagtacnntcagaaccnnatcgagacnntttttttttttttttttttttttttttttt

SEQ ID NO: 8932 - DNA, 84 bp, Artificial
  Barcode component
  misc_feature (33)..(34): n is a, c, g, or t
  misc_feature (43)..(44): n is a, c, g, or t
  misc_feature (53)..(54): n is a, c, g, or t
tttttttaagcagtggtatcaacgcagagtacnntcagaaccnnggaagagtnntttttttttttttttttttttttttttttt

SEQ ID NO: 8933 - DNA, 84 bp, Artificial
  Barcode component
  misc_feature (33)..(34): n is a, c, g, or t
  misc_feature (43)..(44): n is a, c, g, or t
  misc_feature (53)..(54): n is a, c, g, or t
tttttttaagcagtggtatcaacgcagagtacnntcagaaccnnccaagtagnntttttttttttttttttttttttttttttt

SEQ ID NO: 8934 - DNA, 84 bp, Artificial
  Barcode component
  misc_feature (33)..(34): n is a, c, g, or t
  misc_feature (43)..(44): n is a, c, g, or t
  misc_feature (53)..(54): n is a, c, g, or t
tttttttaagcagtggtatcaacgcagagtacnntcagaaccnnctgaacagnntttttttttttttttttttttttttttttt

SEQ ID NO: 8935 - DNA, 84 bp, Artificial
  Barcode component
  misc_feature (33)..(34): n is a, c, g, or t
  misc_feature (43)..(44): n is a, c, g, or t
  misc_feature (53)..(54): n is a, c, g, or t
tttttttaagcagtggtatcaacgcagagtacnntcagaaccnngtaggttcnntttttttttttttttttttttttttttttt

SEQ ID NO: 8936 - DNA, 84 bp, Artificial
  Barcode component
  misc_feature (33)..(34): n is a, c, g, or t
  misc_feature (43)..(44): n is a, c, g, or t
  misc_feature (53)..(54): n is a, c, g, or t
tttttttaagcagtggtatcaacgcagagtacnntcagaaccnngtatggacnntttttttttttttttttttttttttttttt

SEQ ID NO: 8937 - DNA, 84 bp, Artificial
  Barcode component
  misc_feature (33)..(34): n is a, c, g, or t
  misc_feature (43)..(44): n is a, c, g, or t
  misc_feature (53)..(54): n is a, c, g, or t
tttttttaagcagtggtatcaacgcagagtacnntcagaaccnntcgcaacanntttttttttttttttttttttttttttttt

SEQ ID NO: 8938 - DNA, 84 bp, Artificial
  Barcode component
  misc_feature (33)..(34): n is a, c, g, or t
  misc_feature (43)..(44): n is a, c, g, or t
  misc_feature (53)..(54): n is a, c, g, or t
tttttttaagcagtggtatcaacgcagagtacnntcagaaccnnccgctaatnntttttttttttttttttttttttttttttt

SEQ ID NO: 8939 - DNA, 84 bp, Artificial
  Barcode component
  misc_feature (33)..(34): n is a, c, g, or t
  misc_feature (43)..(44): n is a, c, g, or t
  misc_feature (53)..(54): n is a, c, g, or t
tttttttaagcagtggtatcaacgcagagtacnntcagaaccnngattcgcanntttttttttttttttttttttttttttttt

SEQ ID NO: 8940 - DNA, 84 bp, Artificial
  Barcode component
  misc_feature (33)..(34): n is a, c, g, or t
  misc_feature (43)..(44): n is a, c, g, or t
  misc_feature (53)..(54): n is a, c, g, or t
tttttttaagcagtggtatcaacgcagagtacnntcagaaccnncgatggaanntttttttttttttttttttttttttttttt

SEQ ID NO: 8941 - DNA, 84 bp, Artificial
  Barcode component
  misc_feature (33)..(34): n is a, c, g, or t
  misc_feature (43)..(44): n is a, c, g, or t
  misc_feature (53)..(54): n is a, c, g, or t
tttttttaagcagtggtatcaacgcagagtacnntcagaaccnnagcaagganntttttttttttttttttttttttttttttt

SEQ ID NO: 8942 - DNA, 84 bp, Artificial
  Barcode component
  misc_feature (33)..(34): n is a, c, g, or t
  misc_feature (43)..(44): n is a, c, g, or t
  misc_feature (53)..(54): n is a, c, g, or t
tttttttaagcagtggtatcaacgcagagtacnntcagaaccnncgtagcaanntttttttttttttttttttttttttttttt

SEQ ID NO: 8943 - DNA, 84 bp, Artificial
  Barcode component
  misc_feature (33)..(34): n is a, c, g, or t
  misc_feature (43)..(44): n is a, c, g, or t
  misc_feature (53)..(54): n is a, c, g, or t
tttttttaagcagtggtatcaacgcagagtacnntcagaaccnntggcagtanntttttttttttttttttttttttttttttt

SEQ ID NO: 8944 - DNA, 84 bp, Artificial
  Barcode component
  misc_feature (33)..(34): n is a, c, g, or t
  misc_feature (43)..(44): n is a, c, g, or t
  misc_feature (53)..(54): n is a, c, g, or t
tttttttaagcagtggtatcaacgcagagtacnntcagaaccnncggtagttnntttttttttttttttttttttttttttttt

SEQ ID NO: 8945 - DNA, 84 bp, Artificial
  Barcode component
  misc_feature (33)..(34): n is a, c, g, or t
  misc_feature (43)..(44): n is a, c, g, or t
  misc_feature (53)..(54): n is a, c, g, or t
tttttttaagcagtggtatcaacgcagagtacnntcagaaccnntgacttcgnntttttttttttttttttttttttttttttt

SEQ ID NO: 8946 - DNA, 84 bp, Artificial
  Barcode component
  misc_feature (33)..(34): n is a, c, g, or t
  misc_feature (43)..(44): n is a, c, g, or t
  misc_feature (53)..(54): n is a, c, g, or t
tttttttaagcagtggtatcaacgcagagtacnntcagaaccnngagtgcaanntttttttttttttttttttttttttttttt

SEQ ID NO: 8947 - DNA, 84 bp, Artificial
  Barcode component
  misc_feature (33)..(34): n is a, c, g, or t
  misc_feature (43)..(44): n is a, c, g, or t
  misc_feature (53)..(54): n is a, c, g, or t
tttttttaagcagtggtatcaacgcagagtacnntcagaaccnnacggtaacnntttttttttttttttttttttttttttttt

SEQ ID NO: 8948 - DNA, 84 bp, Artificial
  Barcode component
  misc_feature (33)..(34): n is a, c, g, or t
  misc_feature (43)..(44): n is a, c, g, or t
  misc_feature (53)..(54): n is a, c, g, or t
tttttttaagcagtggtatcaacgcagagtacnntcagaaccnnaagtggtgnntttttttttttttttttttttttttttttt

SEQ ID NO: 8949 - DNA, 84 bp, Artificial
  Barcode component
  misc_feature (33)..(34): n is a, c, g, or t
  misc_feature (43)..(44): n is a, c, g, or t
  misc_feature (53)..(54): n is a, c, g, or t
tttttttaagcagtggtatcaacgcagagtacnntcagaaccnnggagacaanntttttttttttttttttttttttttttttt

SEQ ID NO: 8950 - DNA, 84 bp, Artificial
  Barcode component
  misc_feature (33)..(34): n is a, c, g, or t
  misc_feature (43)..(44): n is a, c, g, or t
  misc_feature (53)..(54): n is a, c, g, or t
tttttttaagcagtggtatcaacgcagagtacnntcagaaccnntcaaggacnntttttttttttttttttttttttttttttt

SEQ ID NO: 8951 - DNA, 84 bp, Artificial
  Barcode component
  misc_feature (33)..(34): n is a, c, g, or t
  misc_feature (43)..(44): n is a, c, g, or t
  misc_feature (53)..(54): n is a, c, g, or t
tttttttaagcagtggtatcaacgcagagtacnntcagaaccnnaagagagcnntttttttttttttttttttttttttttttt

SEQ ID NO: 8952 - DNA, 84 bp, Artificial
  Barcode component
  misc_feature (33)..(34): n is a, c, g, or t
  misc_feature (43)..(44): n is a, c, g, or t
  misc_feature (53)..(54): n is a, c, g, or t
tttttttaagcagtggtatcaacgcagagtacnntcagaaccnncgagagatnntttttttttttttttttttttttttttttt

SEQ ID NO: 8953 - DNA, 84 bp, Artificial
  Barcode component
  misc_feature (33)..(34): n is a, c, g, or t
  misc_feature (43)..(44): n is a, c, g, or t
  misc_feature (53)..(54): n is a, c, g, or t
tttttttaagcagtggtatcaacgcagagtacnntcagaaccnnacagatggnntttttttttttttttttttttttttttttt

SEQ ID NO: 8954 - DNA, 84 bp, Artificial
  Barcode component
  misc_feature (33)..(34): n is a, c, g, or t
  misc_feature (43)..(44): n is a, c, g, or t
  misc_feature (53)..(54): n is a, c, g, or t
tttttttaagcagtggtatcaacgcagagtacnntcagaaccnnaggagtcanntttttttttttttttttttttttttttttt

SEQ ID NO: 8955 - DNA, 84 bp, Artificial
  Barcode component
  misc_feature (33)..(34): n is a, c, g, or t
  misc_feature (43)..(44): n is a, c, g, or t
  misc_feature (53)..(54): n is a, c, g, or t
tttttttaagcagtggtatcaacgcagagtacnntcagaaccnncgtgttacnntttttttttttttttttttttttttttttt

SEQ ID NO: 8956 - DNA, 84 bp, Artificial
  Barcode component
  misc_feature (33)..(34): n is a, c, g, or t
  misc_feature (43)..(44): n is a, c, g, or t
  misc_feature (53)..(54): n is a, c, g, or t
tttttttaagcagtggtatcaacgcagagtacnntcagaaccnntagtgtgcnntttttttttttttttttttttttttttttt

SEQ ID NO: 8957 - DNA, 84 bp, Artificial
  Barcode component
  misc_feature (33)..(34): n is a, c, g, or t
  misc_feature (43)..(44): n is a, c, g, or t
  misc_feature (53)..(54): n is a, c, g, or t
tttttttaagcagtggtatcaacgcagagtacnntcagaaccnnctcatgacnntttttttttttttttttttttttttttttt

SEQ ID NO: 8958 - DNA, 84 bp, Artificial
  Barcode component
  misc_feature (33)..(34): n is a, c, g, or t
  misc_feature (43)..(44): n is a, c, g, or t
  misc_feature (53)..(54): n is a, c, g, or t
tttttttaagcagtggtatcaacgcagagtacnntcagaaccnngtatccagnntttttttttttttttttttttttttttttt

SEQ ID NO: 8959 - DNA, 84 bp, Artificial
  Barcode component
  misc_feature (33)..(34): n is a, c, g, or t
  misc_feature (43)..(44): n is a, c, g, or t
  misc_feature (53)..(54): n is a, c, g, or t
tttttttaagcagtggtatcaacgcagagtacnntcagaaccnnacgcctatnntttttttttttttttttttttttttttttt

SEQ ID NO: 8960 - DNA, 84 bp, Artificial
  Barcode component
  misc_feature (33)..(34): n is a, c, g, or t
  misc_feature (43)..(44): n is a, c, g, or t
  misc_feature (53)..(54): n is a, c, g, or t
tttttttaagcagtggtatcaacgcagagtacnntcagaaccnnaacgacctnntttttttttttttttttttttttttttttt

SEQ ID NO: 8961 - DNA, 84 bp, Artificial
  Barcode component
  misc_feature (33)..(34): n is a, c, g, or t
  misc_feature (43)..(44): n is a, c, g, or t
  misc_feature (53)..(54): n is a, c, g, or t
tttttttaagcagtggtatcaacgcagagtacnntcagaaccnnatcaggctnntttttttttttttttttttttttttttttt

SEQ ID NO: 8962 - DNA, 84 bp, Artificial
  Barcode component
  misc_feature (33)..(34): n is a, c, g, or t
  misc_feature (43)..(44): n is a, c, g, or t
  misc_feature (53)..(54): n is a, c, g, or t
tttttttaagcagtggtatcaacgcagagtacnntcagaaccnncaagttcgnntttttttttttttttttttttttttttttt

SEQ ID NO: 8963 - DNA, 84 bp, Artificial
  Barcode component
  misc_feature (33)..(34): n is a, c, g, or t
  misc_feature (43)..(44): n is a, c, g, or t
  misc_feature (53)..(54): n is a, c, g, or t
tttttttaagcagtggtatcaacgcagagtacnntcagaaccnntagccaganntttttttttttttttttttttttttttttt

SEQ ID NO: 8964 - DNA, 84 bp, Artificial
  Barcode component
  misc_feature (33)..(34): n is a, c, g, or t
  misc_feature (43)..(44): n is a, c, g, or t
  misc_feature (53)..(54): n is a, c, g, or t
tttttttaagcagtggtatcaacgcagagtacnntcagaaccnncaatcacgnntttttttttttttttttttttttttttttt

SEQ ID NO: 8965 - DNA, 84 bp, Artificial
  Barcode component
  misc_feature (33)..(34): n is a, c, g, or t
  misc_feature (43)..(44): n is a, c, g, or t
  misc_feature (53)..(54): n is a, c, g, or t
tttttttaagcagtggtatcaacgcagagtacnntcagaaccnngcaacaagnntttttttttttttttttttttttttttttt

SEQ ID NO: 8966 - DNA, 84 bp, Artificial
  Barcode component
  misc_feature (33)..(34): n is a, c, g, or t
  misc_feature (43)..(44): n is a, c, g, or t
  misc_feature (53)..(54): n is a, c, g, or t
tttttttaagcagtggtatcaacgcagagtacnntcagaaccnncacgacaanntttttttttttttttttttttttttttttt

SEQ ID NO: 8967 - DNA, 84 bp, Artificial
  Barcode component
  misc_feature (33)..(34): n is a, c, g, or t
  misc_feature (43)..(44): n is a, c, g, or t
  misc_feature (53)..(54): n is a, c, g, or t
tttttttaagcagtggtatcaacgcagagtacnntcagaaccnntacggaganntttttttttttttttttttttttttttttt

SEQ ID NO: 8968 - DNA, 84 bp, Artificial
  Barcode component
  misc_feature (33)..(34): n is a, c, g, or t
  misc_feature (43)..(44): n is a, c, g, or t
  misc_feature (53)..(54): n is a, c, g, or t
tttttttaagcagtggtatcaacgcagagtacnntcagaaccnncgacaaganntttttttttttttttttttttttttttttt

SEQ ID NO: 8969 - DNA, 84 bp, Artificial
  Barcode component
  misc_feature (33)..(34): n is a, c, g, or t
  misc_feature (43)..(44): n is a, c, g, or t
  misc_feature (53)..(54): n is a, c, g, or t
tttttttaagcagtggtatcaacgcagagtacnntcagaaccnncgaagtganntttttttttttttttttttttttttttttt

SEQ ID NO: 8970 - DNA, 84 bp, Artificial
  Barcode component
  misc_feature (33)..(34): n is a, c, g, or t
  misc_feature (43)..(44): n is a, c, g, or t
  misc_feature (53)..(54): n is a, c, g, or t
tttttttaagcagtggtatcaacgcagagtacnntcagaaccnnagctggtanntttttttttttttttttttttttttttttt

SEQ ID NO: 8971 - DNA, 84 bp, Artificial
  Barcode component
  misc_feature (33)..(34): n is a, c, g, or t
  misc_feature (43)..(44): n is a, c, g, or t
  misc_feature (53)..(54): n is a, c, g, or t
tttttttaagcagtggtatcaacgcagagtacnntcagaaccnnaactaggcnntttttttttttttttttttttttttttttt

SEQ ID NO: 8972 - DNA, 84 bp, Artificial
  Barcode component
  misc_feature (33)..(34): n is a, c, g, or t
  misc_feature (43)..(44): n is a, c, g, or t
  misc_feature (53)..(54): n is a, c, g, or t
tttttttaagcagtggtatcaacgcagagtacnntcagaaccnncagcaagtnntttttttttttttttttttttttttttttt

SEQ ID NO: 8973 - DNA, 84 bp, Artificial
  Barcode component
  misc_feature (33)..(34): n is a, c, g, or t
  misc_feature (43)..(44): n is a, c, g, or t
  misc_feature (53)..(54): n is a, c, g, or t
tttttttaagcagtggtatcaacgcagagtacnntcagaaccnnacgaggtanntttttttttttttttttttttttttttttt

SEQ ID NO: 8974 - DNA, 84 bp, Artificial
  Barcode component
  misc_feature (33)..(34): n is a, c, g, or t
  misc_feature (43)..(44): n is a, c, g, or t
  misc_feature (53)..(54): n is a, c, g, or t
tttttttaagcagtggtatcaacgcagagtacnntcagaaccnncatcttccnntttttttttttttttttttttttttttttt

SEQ ID NO: 8975 - DNA, 84 bp, Artificial
  Barcode component
  misc_feature (33)..(34): n is a, c, g, or t
  misc_feature (43)..(44): n is a, c, g, or t
  misc_feature (53)..(54): n is a, c, g, or t
tttttttaagcagtggtatcaacgcagagtacnntcagaaccnncctgaatcnntttttttttttttttttttttttttttttt

SEQ ID NO: 8976 - DNA, 84 bp, Artificial
  Barcode component
  misc_feature (33)..(34): n is a, c, g, or t
  misc_feature (43)..(44): n is a, c, g, or t
  misc_feature (53)..(54): n is a, c, g, or t
tttttttaagcagtggtatcaacgcagagtacnntcagaaccnntgcagactnntttttttttttttttttttttttttttttt

SEQ ID NO: 8977 - DNA, 84 bp, Artificial
  Barcode component
  misc_feature (33)..(34): n is a, c, g, or t
  misc_feature (43)..(44): n is a, c, g, or t
  misc_feature (53)..(54): n is a, c, g, or t
tttttttaagcagtggtatcaacgcagagtacnntcagaaccnnagatgtggnntttttttttttttttttttttttttttttt

SEQ ID NO: 8978 - DNA, 84 bp, Artificial
  Barcode component
  misc_feature (33)..(34): n is a, c, g, or t
  misc_feature (43)..(44): n is a, c, g, or t
  misc_feature (53)..(54): n is a, c, g, or t
tttttttaagcagtggtatcaacgcagagtacnntcagaaccnnagttcgacnntttttttttttttttttttttttttttttt

SEQ ID NO: 8979 - DNA, 84 bp, Artificial
  Barcode component
  misc_feature (33)..(34): n is a, c, g, or t
  misc_feature (43)..(44): n is a, c, g, or t
  misc_feature (53)..(54): n is a, c, g, or t
tttttttaagcagtggtatcaacgcagagtacnntcagaaccnnacaacctcnntttttttttttttttttttttttttttttt

SEQ ID NO: 8980 - DNA, 84 bp, Artificial
  Barcode component
  misc_feature (33)..(34): n is a, c, g, or t
  misc_feature (43)..(44): n is a, c, g, or t
  misc_feature (53)..(54): n is a, c, g, or t
tttttttaagcagtggtatcaacgcagagtacnntcagaaccnncatggtagnntttttttttttttttttttttttttttttt

SEQ ID NO: 8981 - DNA, 84 bp, Artificial
  Barcode component
  misc_feature (33)..(34): n is a, c, g, or t
  misc_feature (43)..(44): n is a, c, g, or t
  misc_feature (53)..(54): n is a, c, g, or t
tttttttaagcagtggtatcaacgcagagtacnntcagaaccnncgtatctcnntttttttttttttttttttttttttttttt

SEQ ID NO: 8982 - DNA, 84 bp, Artificial
  Barcode component
  misc_feature (33)..(34): n is a, c, g, or t
  misc_feature (43)..(44): n is a, c, g, or t
  misc_feature (53)..(54): n is a, c, g, or t
tttttttaagcagtggtatcaacgcagagtacnntcagaaccnncctagttcnntttttttttttttttttttttttttttttt

SEQ ID NO: 8983 - DNA, 84 bp, Artificial
  Barcode component
  misc_feature (33)..(34): n is a, c, g, or t
  misc_feature (43)..(44): n is a, c, g, or t
  misc_feature (53)..(54): n is a, c, g, or t
tttttttaagcagtggtatcaacgcagagtacnntcagaaccnncaagagtcnntttttttttttttttttttttttttttttt

SEQ ID NO: 8984 - DNA, 84 bp, Artificial
  Barcode component
  misc_feature (33)..(34): n is a, c, g, or t
  misc_feature (43)..(44): n is a, c, g, or t
  misc_feature (53)..(54): n is a, c, g, or t
tttttttaagcagtggtatcaacgcagagtacnntcatgtccnnaatcggcanntttttttttttttttttttttttttttttt

SEQ ID NO: 8985 - DNA, 84 bp, Artificial
  Barcode component
  misc_feature (33)..(34): n is a, c, g, or t
  misc_feature (43)..(44): n is a, c, g, or t
  misc_feature (53)..(54): n is a, c, g, or t
tttttttaagcagtggtatcaacgcagagtacnntcatgtccnntacggcatnntttttttttttttttttttttttttttttt

SEQ ID NO: 8986 - DNA, 84 bp, Artificial
  Barcode component
  misc_feature (33)..(34): n is a, c, g, or t
  misc_feature (43)..(44): n is a, c, g, or t
  misc_feature (53)..(54): n is a, c, g, or t
tttttttaagcagtggtatcaacgcagagtacnntcatgtccnnttggatcgnntttttttttttttttttttttttttttttt

SEQ ID NO: 8987 - DNA, 84 bp, Artificial
  Barcode component
  misc_feature (33)..(34): n is a, c, g, or t
  misc_feature (43)..(44): n is a, c, g, or t
  misc_feature (53)..(54): n is a, c, g, or t
tttttttaagcagtggtatcaacgcagagtacnntcatgtccnntggaacganntttttttttttttttttttttttttttttt

SEQ ID NO: 8988 - DNA, 84 bp, Artificial
  Barcode component
  misc_feature (33)..(34): n is a, c, g, or t
  misc_feature (43)..(44): n is a, c, g, or t
  misc_feature (53)..(54): n is a, c, g, or t
tttttttaagcagtggtatcaacgcagagtacnntcatgtccnnggcaatcanntttttttttttttttttttttttttttttt

SEQ ID NO: 8989 - DNA, 84 bp, Artificial
  Barcode component
  misc_feature (33)..(34): n is a, c, g, or t
  misc_feature (43)..(44): n is a, c, g, or t
  misc_feature (53)..(54): n is a, c, g, or t
tttttttaagcagtggtatcaacgcagagtacnntcatgtccnngaatccganntttttttttttttttttttttttttttttt

SEQ ID NO: 8990 - DNA, 84 bp, Artificial
  Barcode component
  misc_feature (33)..(34): n is a, c, g, or t
  misc_feature (43)..(44): n is a, c, g, or t
  misc_feature (53)..(54): n is a, c, g, or t
tttttttaagcagtggtatcaacgcagagtacnntcatgtccnnttacggtgnntttttttttttttttttttttttttttttt

SEQ ID NO: 8991 - DNA, 84 bp, Artificial
  Barcode component
  misc_feature (33)..(34): n is a, c, g, or t
  misc_feature (43)..(44): n is a, c, g, or t
  misc_feature (53)..(54): n is a, c, g, or t
tttttttaagcagtggtatcaacgcagagtacnntcatgtccnncatatcggnntttttttttttttttttttttttttttttt

SEQ ID NO: 8992 - DNA, 84 bp, Artificial
  Barcode component
  misc_feature (33)..(34): n is a, c, g, or t
  misc_feature (43)..(44): n is a, c, g, or t
  misc_feature (53)..(54): n is a, c, g, or t
tttttttaagcagtggtatcaacgcagagtacnntcatgtccnncttcggtanntttttttttttttttttttttttttttttt

SEQ ID NO: 8993 - DNA, 84 bp, Artificial
  Barcode component
  misc_feature (33)..(34): n is a, c, g, or t
  misc_feature (43)..(44): n is a, c, g, or t
  misc_feature (53)..(54): n is a, c, g, or t
tttttttaagcagtggtatcaacgcagagtacnntcatgtccnntcctaacgnntttttttttttttttttttttttttttttt

SEQ ID NO: 8994 - DNA, 84 bp, Artificial
  Barcode component
  misc_feature (33)..(34): n is a, c, g, or t
  misc_feature (43)..(44): n is a, c, g, or t
  misc_feature (53)..(54): n is a, c, g, or t
tttttttaagcagtggtatcaacgcagagtacnntcatgtccnngtaagccanntttttttttttttttttttttttttttttt

SEQ ID NO: 8995 - DNA, 84 bp, Artificial
  Barcode component
  misc_feature (33)..(34): n is a, c, g, or t
  misc_feature (43)..(44): n is a, c, g, or t
  misc_feature (53)..(54): n is a, c, g, or t
tttttttaagcagtggtatcaacgcagagtacnntcatgtccnntaaggtggnntttttttttttttttttttttttttttttt

SEQ ID NO: 8996 - DNA, 84 bp, Artificial
  Barcode component
  misc_feature (33)..(34): n is a, c, g, or t
  misc_feature (43)..(44): n is a, c, g, or t
  misc_feature (53)..(54): n is a, c, g, or t
tttttttaagcagtggtatcaacgcagagtacnntcatgtccnnggtaagctnntttttttttttttttttttttttttttttt

SEQ ID NO: 8997 - DNA, 84 bp, Artificial
  Barcode component
  misc_feature (33)..(34): n is a, c, g, or t
  misc_feature (43)..(44): n is a, c, g, or t
  misc_feature (53)..(54): n is a, c, g, or t
tttttttaagcagtggtatcaacgcagagtacnntcatgtccnntgtgtcganntttttttttttttttttttttttttttttt

SEQ ID NO: 8998 - DNA, 84 bp, Artificial
  Barcode component
  misc_feature (33)..(34): n is a, c, g, or t
  misc_feature (43)..(44): n is a, c, g, or t
  misc_feature (53)..(54): n is a, c, g, or t
tttttttaagcagtggtatcaacgcagagtacnntcatgtccnngagcatganntttttttttttttttttttttttttttttt

SEQ ID NO: 8999 - DNA, 84 bp, Artificial
  Barcode component
  misc_feature (33)..(34): n is a, c, g, or t
  misc_feature (43)..(44): n is a, c, g, or t
  misc_feature (53)..(54): n is a, c, g, or t
tttttttaagcagtggtatcaacgcagagtacnntcatgtccnntcgaagtcnntttttttttttttttttttttttttttttt

SEQ ID NO: 9000 - DNA, 84 bp, Artificial
  Barcode component
  misc_feature (33)..(34): n is a, c, g, or t
  misc_feature (43)..(44): n is a, c, g, or t
  misc_feature (53)..(54): n is a, c, g, or t
tttttttaagcagtggtatcaacgcagagtacnntcatgtccnnggtgaacanntttttttttttttttttttttttttttttt

SEQ ID NO: 9001 - DNA, 84 bp, Artificial
  Barcode component
  misc_feature (33)..(34): n is a, c, g, or t
  misc_feature (43)..(44): n is a, c, g, or t
  misc_feature (53)..(54): n is a, c, g, or t
tttttttaagcagtggtatcaacgcagagtacnntcatgtccnnacatgcacnntttttttttttttttttttttttttttttt

SEQ ID NO: 9002 - DNA, 84 bp, Artificial
  Barcode component
  misc_feature (33)..(34): n is a, c, g, or t
  misc_feature (43)..(44): n is a, c, g, or t
  misc_feature (53)..(54): n is a, c, g, or t
tttttttaagcagtggtatcaacgcagagtacnntcatgtccnnccaacagtnntttttttttttttttttttttttttttttt

SEQ ID NO: 9003 - DNA, 84 bp, Artificial
  Barcode component
  misc_feature (33)..(34): n is a, c, g, or t
  misc_feature (43)..(44): n is a, c, g, or t
  misc_feature (53)..(54): n is a, c, g, or t
tttttttaagcagtggtatcaacgcagagtacnntcatgtccnnagaacagcnntttttttttttttttttttttttttttttt

SEQ ID NO: 9004 - DNA, 84 bp, Artificial
  Barcode component
  misc_feature (33)..(34): n is a, c, g, or t
  misc_feature (43)..(44): n is a, c, g, or t
  misc_feature (53)..(54): n is a, c, g, or t
tttttttaagcagtggtatcaacgcagagtacnntcatgtccnngaacacgtnntttttttttttttttttttttttttttttt

SEQ ID NO: 9005 - DNA, 84 bp, Artificial
  Barcode component
  misc_feature (33)..(34): n is a, c, g, or t
  misc_feature (43)..(44): n is a, c, g, or t
  misc_feature (53)..(54): n is a, c, g, or t
tttttttaagcagtggtatcaacgcagagtacnntcatgtccnnggtcttcanntttttttttttttttttttttttttttttt

SEQ ID NO: 9006 - DNA, 84 bp, Artificial
  Barcode component
  misc_feature (33)..(34): n is a, c, g, or t
  misc_feature (43)..(44): n is a, c, g, or t
  misc_feature (53)..(54): n is a, c, g, or t
tttttttaagcagtggtatcaacgcagagtacnntcatgtccnnaggttcagnntttttttttttttttttttttttttttttt

SEQ ID NO: 9007 - DNA, 84 bp, Artificial
  Barcode component
  misc_feature (33)..(34): n is a, c, g, or t
  misc_feature (43)..(44): n is a, c, g, or t
  misc_feature (53)..(54): n is a, c, g, or t
tttttttaagcagtggtatcaacgcagagtacnntcatgtccnnctagagcanntttttttttttttttttttttttttttttt

SEQ ID NO: 9008 - DNA, 84 bp, Artificial
  Barcode component
  misc_feature (33)..(34): n is a, c, g, or t
  misc_feature (43)..(44): n is a, c, g, or t
  misc_feature (53)..(54): n is a, c, g, or t
tttttttaagcagtggtatcaacgcagagtacnntcatgtccnncttctagcnntttttttttttttttttttttttttttttt

SEQ ID NO: 9009 - DNA, 84 bp, Artificial
  Barcode component
  misc_feature (33)..(34): n is a, c, g, or t
  misc_feature (43)..(44): n is a, c, g, or t
  misc_feature (53)..(54): n is a, c, g, or t
tttttttaagcagtggtatcaacgcagagtacnntcatgtccnngagtaacgnntttttttttttttttttttttttttttttt

SEQ ID NO: 9010 - DNA, 84 bp, Artificial
  Barcode component
  misc_feature (33)..(34): n is a, c, g, or t
  misc_feature (43)..(44): n is a, c, g, or t
  misc_feature (53)..(54): n is a, c, g, or t
tttttttaagcagtggtatcaacgcagagtacnntcatgtccnnctaagaggnntttttttttttttttttttttttttttttt

SEQ ID NO: 9011 - DNA, 84 bp, Artificial
  Barcode component
  misc_feature (33)..(34): n is a, c, g, or t
  misc_feature (43)..(44): n is a, c, g, or t
  misc_feature (53)..(54): n is a, c, g, or t
tttttttaagcagtggtatcaacgcagagtacnntcatgtccnnacgtgtagnntttttttttttttttttttttttttttttt

SEQ ID NO: 9012 - DNA, 84 bp, Artificial
  Barcode component
  misc_feature (33)..(34): n is a, c, g, or t
  misc_feature (43)..(44): n is a, c, g, or t
  misc_feature (53)..(54): n is a, c, g, or t
tttttttaagcagtggtatcaacgcagagtacnntcatgtccnnactacaggnntttttttttttttttttttttttttttttt

SEQ ID NO: 9013 - DNA, 84 bp, Artificial
  Barcode component
  misc_feature (33)..(34): n is a, c, g, or t
  misc_feature (43)..(44): n is a, c, g, or t
  misc_feature (53)..(54): n is a, c, g, or t
tttttttaagcagtggtatcaacgcagagtacnntcatgtccnntacaggtcnntttttttttttttttttttttttttttttt

SEQ ID NO: 9014 - DNA, 84 bp, Artificial
  Barcode component
  misc_feature (33)..(34): n is a, c, g, or t
  misc_feature (43)..(44): n is a, c, g, or t
  misc_feature (53)..(54): n is a, c, g, or t
tttttttaagcagtggtatcaacgcagagtacnntcatgtccnnctcacatgnntttttttttttttttttttttttttttttt

SEQ ID NO: 9015 - DNA, 84 bp, Artificial
  Barcode component
  misc_feature (33)..(34): n is a, c, g, or t
  misc_feature (43)..(44): n is a, c, g, or t
  misc_feature (53)..(54): n is a, c, g, or t
tttttttaagcagtggtatcaacgcagagtacnntcatgtccnnactaggagnntttttttttttttttttttttttttttttt

SEQ ID NO: 9016 - DNA, 84 bp, Artificial
  Barcode component
  misc_feature (33)..(34): n is a, c, g, or t
  misc_feature (43)..(44): n is a, c, g, or t
  misc_feature (53)..(54): n is a, c, g, or t
tttttttaagcagtggtatcaacgcagagtacnntcatgtccnnccatagganntttttttttttttttttttttttttttttt

SEQ ID NO: 9017 - DNA, 84 bp, Artificial
  Barcode component
  misc_feature (33)..(34): n is a, c, g, or t
  misc_feature (43)..(44): n is a, c, g, or t
  misc_feature (53)..(54): n is a, c, g, or t
tttttttaagcagtggtatcaacgcagagtacnntcatgtccnnggagaatcnntttttttttttttttttttttttttttttt

SEQ ID NO: 9018 - DNA, 84 bp, Artificial
  Barcode component
  misc_feature (33)..(34): n is a, c, g, or t
  misc_feature (43)..(44): n is a, c, g, or t
  misc_feature (53)..(54): n is a, c, g, or t
tttttttaagcagtggtatcaacgcagagtacnntcatgtccnngccaagaanntttttttttttttttttttttttttttttt

SEQ ID NO: 9019 - DNA, 84 bp, Artificial
  Barcode component
  misc_feature (33)..(34): n is a, c, g, or t
  misc_feature (43)..(44): n is a, c, g, or t
  misc_feature (53)..(54): n is a, c, g, or t
tttttttaagcagtggtatcaacgcagagtacnntcatgtccnnaaggcaagnntttttttttttttttttttttttttttttt

SEQ ID NO: 9020 - DNA, 84 bp, Artificial
  Barcode component
  misc_feature (33)..(34): n is a, c, g, or t
  misc_feature (43)..(44): n is a, c, g, or t
  misc_feature (53)..(54): n is a, c, g, or t
tttttttaagcagtggtatcaacgcagagtacnntcatgtccnnaatgtcgcnntttttttttttttttttttttttttttttt

SEQ ID NO: 9021 - DNA, 84 bp, Artificial
  Barcode component
  misc_feature (33)..(34): n is a, c, g, or t
  misc_feature (43)..(44): n is a, c, g, or t
  misc_feature (53)..(54): n is a, c, g, or t
tttttttaagcagtggtatcaacgcagagtacnntcatgtccnnatggaaccnntttttttttttttttttttttttttttttt

SEQ ID NO: 9022 - DNA, 84 bp, Artificial
  Barcode component
  misc_feature (33)..(34): n is a, c, g, or t
  misc_feature (43)..(44): n is a, c, g, or t
  misc_feature (53)..(54): n is a, c, g, or t
tttttttaagcagtggtatcaacgcagagtacnntcatgtccnnagaggcatnntttttttttttttttttttttttttttttt

SEQ ID NO: 9023 - DNA, 84 bp, Artificial
  Barcode component
  misc_feature (33)..(34): n is a, c, g, or t
  misc_feature (43)..(44): n is a, c, g, or t
  misc_feature (53)..(54): n is a, c, g, or t
tttttttaagcagtggtatcaacgcagagtacnntcatgtccnntgcatagcnntttttttttttttttttttttttttttttt

SEQ ID NO: 9024 - DNA, 84 bp, Artificial
  Barcode component
  misc_feature (33)..(34): n is a, c, g, or t
  misc_feature (43)..(44): n is a, c, g, or t
  misc_feature (53)..(54): n is a, c, g, or t
tttttttaagcagtggtatcaacgcagagtacnntcatgtccnnctaacgganntttttttttttttttttttttttttttttt

SEQ ID NO: 9025 - DNA, 84 bp, Artificial
  Barcode component
  misc_feature (33)..(34): n is a, c, g, or t
  misc_feature (43)..(44): n is a, c, g, or t
  misc_feature (53)..(54): n is a, c, g, or t
tttttttaagcagtggtatcaacgcagagtacnntcatgtccnntatcgaggnntttttttttttttttttttttttttttttt

SEQ ID NO: 9026 - DNA, 84 bp, Artificial
  Barcode component
  misc_feature (33)..(34): n is a, c, g, or t
  misc_feature (43)..(44): n is a, c, g, or t
  misc_feature (53)..(54): n is a, c, g, or t
tttttttaagcagtggtatcaacgcagagtacnntcatgtccnncatagcctnntttttttttttttttttttttttttttttt

SEQ ID NO: 9027 - DNA, 84 bp, Artificial
  Barcode component
  misc_feature (33)..(34): n is a, c, g, or t
  misc_feature (43)..(44): n is a, c, g, or t
  misc_feature (53)..(54): n is a, c, g, or t
tttttttaagcagtggtatcaacgcagagtacnntcatgtccnnatcgagacnntttttttttttttttttttttttttttttt

SEQ ID NO: 9028 - DNA, 84 bp, Artificial
  Barcode component
  misc_feature (33)..(34): n is a, c, g, or t
  misc_feature (43)..(44): n is a, c, g, or t
  misc_feature (53)..(54): n is a, c, g, or t
tttttttaagcagtggtatcaacgcagagtacnntcatgtccnnggaagagtnntttttttttttttttttttttttttttttt

SEQ ID NO: 9029 - DNA, 84 bp, Artificial
  Barcode component
  misc_feature (33)..(34): n is a, c, g, or t
  misc_feature (43)..(44): n is a, c, g, or t
  misc_feature (53)..(54): n is a, c, g, or t
tttttttaagcagtggtatcaacgcagagtacnntcatgtccnnccaagtagnntttttttttttttttttttttttttttttt

SEQ ID NO: 9030 - DNA, 84 bp, Artificial
  Barcode component
  misc_feature (33)..(34): n is a, c, g, or t
  misc_feature (43)..(44): n is a, c, g, or t
  misc_feature (53)..(54): n is a, c, g, or t
tttttttaagcagtggtatcaacgcagagtacnntcatgtccnnctgaacagnntttttttttttttttttttttttttttttt

SEQ ID NO: 9031 - DNA, 84 bp, Artificial
  Barcode component
  misc_feature (33)..(34): n is a, c, g, or t
  misc_feature (43)..(44): n is a, c, g, or t
  misc_feature (53)..(54): n is a, c, g, or t
tttttttaagcagtggtatcaacgcagagtacnntcatgtccnngtaggttcnntttttttttttttttttttttttttttttt

SEQ ID NO: 9032 - DNA, 84 bp, Artificial
  Barcode component
  misc_feature (33)..(34): n is a, c, g, or t
  misc_feature (43)..(44): n is a, c, g, or t
  misc_feature (53)..(54): n is a, c, g, or t
tttttttaagcagtggtatcaacgcagagtacnntcatgtccnngtatggacnntttttttttttttttttttttttttttttt

SEQ ID NO: 9033 - DNA, 84 bp, Artificial
  Barcode component
  misc_feature (33)..(34): n is a, c, g, or t
  misc_feature (43)..(44): n is a, c, g, or t
  misc_feature (53)..(54): n is a, c, g, or t
tttttttaagcagtggtatcaacgcagagtacnntcatgtccnntcgcaacanntttttttttttttttttttttttttttttt

SEQ ID NO: 9034 - DNA, 84 bp, Artificial
  Barcode component
  misc_feature (33)..(34): n is a, c, g, or t
  misc_feature (43)..(44): n is a, c, g, or t
  misc_feature (53)..(54): n is a, c, g, or t
tttttttaagcagtggtatcaacgcagagtacnntcatgtccnnccgctaatnntttttttttttttttttttttttttttttt

SEQ ID NO: 9035 - DNA, 84 bp, Artificial
  Barcode component
  misc_feature (33)..(34): n is a, c, g, or t
  misc_feature (43)..(44): n is a, c, g, or t
  misc_feature (53)..(54): n is a, c, g, or t
tttttttaagcagtggtatcaacgcagagtacnntcatgtccnngattcgcanntttttttttttttttttttttttttttttt

SEQ ID NO: 9036 - DNA, 84 bp, Artificial
  Barcode component
  misc_feature (33)..(34): n is a, c, g, or t
  misc_feature (43)..(44): n is a, c, g, or t
  misc_feature (53)..(54): n is a, c, g, or t
tttttttaagcagtggtatcaacgcagagtacnntcatgtccnncgatggaanntttttttttttttttttttttttttttttt

SEQ ID NO: 9037 - DNA, 84 bp, Artificial
  Barcode component
  misc_feature (33)..(34): n is a, c, g, or t
  misc_feature (43)..(44): n is a, c, g, or t
  misc_feature (53)..(54): n is a, c, g, or t
tttttttaagcagtggtatcaacgcagagtacnntcatgtccnnagcaagganntttttttttttttttttttttttttttttt

SEQ ID NO: 9038 - DNA, 84 bp, Artificial
  Barcode component
  misc_feature (33)..(34): n is a, c, g, or t
  misc_feature (43)..(44): n is a, c, g, or t
  misc_feature (53)..(54): n is a, c, g, or t
tttttttaagcagtggtatcaacgcagagtacnntcatgtccnncgtagcaanntttttttttttttttttttttttttttttt

SEQ ID NO: 9039 - DNA, 84 bp, Artificial
  Barcode component
  misc_feature (33)..(34): n is a, c, g, or t
  misc_feature (43)..(44): n is a, c, g, or t
  misc_feature (53)..(54): n is a, c, g, or t
tttttttaagcagtggtatcaacgcagagtacnntcatgtccnntggcagtanntttttttttttttttttttttttttttttt

SEQ ID NO: 9040 - DNA, 84 bp, Artificial
  Barcode component
  misc_feature (33)..(34): n is a, c, g, or t
  misc_feature (43)..(44): n is a, c, g, or t
  misc_feature (53)..(54): n is a, c, g, or t
tttttttaagcagtggtatcaacgcagagtacnntcatgtccnncggtagttnntttttttttttttttttttttttttttttt

SEQ ID NO: 9041 - DNA, 84 bp, Artificial
  Barcode component
  misc_feature (33)..(34): n is a, c, g, or t
  misc_feature (43)..(44): n is a, c, g, or t
  misc_feature (53)..(54): n is a, c, g, or t
tttttttaagcagtggtatcaacgcagagtacnntcatgtccnntgacttcgnntttttttttttttttttttttttttttttt

SEQ ID NO: 9042 - DNA, 84 bp, Artificial
  Barcode component
  misc_feature (33)..(34): n is a, c, g, or t
  misc_feature (43)..(44): n is a, c, g, or t
  misc_feature (53)..(54): n is a, c, g, or t
tttttttaagcagtggtatcaacgcagagtacnntcatgtccnngagtgcaanntttttttttttttttttttttttttttttt

SEQ ID NO: 9043 - DNA, 84 bp, Artificial
  Barcode component
  misc_feature (33)..(34): n is a, c, g, or t
  misc_feature (43)..(44): n is a, c, g, or t
  misc_feature (53)..(54): n is a, c, g, or t
tttttttaagcagtggtatcaacgcagagtacnntcatgtccnnacggtaacnntttttttttttttttttttttttttttttt

SEQ ID NO: 9044 - DNA, 84 bp, Artificial
  Barcode component
  misc_feature (33)..(34): n is a, c, g, or t
  misc_feature (43)..(44): n is a, c, g, or t
  misc_feature (53)..(54): n is a, c, g, or t
tttttttaagcagtggtatcaacgcagagtacnntcatgtccnnaagtggtgnntttttttttttttttttttttttttttttt

SEQ ID NO: 9045 - DNA, 84 bp, Artificial
  Barcode component
  misc_feature (33)..(34): n is a, c, g, or t
  misc_feature (43)..(44): n is a, c, g, or t
  misc_feature (53)..(54): n is a, c, g, or t
tttttttaagcagtggtatcaacgcagagtacnntcatgtccnnggagacaanntttttttttttttttttttttttttttttt

SEQ ID NO: 9046 - DNA, 84 bp, Artificial
  Barcode component
  misc_feature (33)..(34): n is a, c, g, or t
  misc_feature (43)..(44): n is a, c, g, or t
  misc_feature (53)..(54): n is a, c, g, or t
tttttttaagcagtggtatcaacgcagagtacnntcatgtccnntcaaggacnntttttttttttttttttttttttttttttt

SEQ ID NO: 9047 - DNA, 84 bp, Artificial
  Barcode component
  misc_feature (33)..(34): n is a, c, g, or t
  misc_feature (43)..(44): n is a, c, g, or t
  misc_feature (53)..(54): n is a, c, g, or t
tttttttaagcagtggtatcaacgcagagtacnntcatgtccnnaagagagcnntttttttttttttttttttttttttttttt

SEQ ID NO: 9048 - DNA, 84 bp, Artificial
  Barcode component
  misc_feature (33)..(34): n is a, c, g, or t
  misc_feature (43)..(44): n is a, c, g, or t
  misc_feature (53)..(54): n is a, c, g, or t
tttttttaagcagtggtatcaacgcagagtacnntcatgtccnncgagagatnntttttttttttttttttttttttttttttt

SEQ ID NO: 9049 - DNA, 84 bp, Artificial
  Barcode component
  misc_feature (33)..(34): n is a, c, g, or t
  misc_feature (43)..(44): n is a, c, g, or t
  misc_feature (53)..(54): n is a, c, g, or t
tttttttaagcagtggtatcaacgcagagtacnntcatgtccnnacagatggnntttttttttttttttttttttttttttttt

SEQ ID NO: 9050 - DNA, 84 bp, Artificial
  Barcode component
  misc_feature (33)..(34): n is a, c, g, or t
  misc_feature (43)..(44): n is a, c, g, or t
  misc_feature (53)..(54): n is a, c, g, or t
tttttttaagcagtggtatcaacgcagagtacnntcatgtccnnaggagtcanntttttttttttttttttttttttttttttt

SEQ ID NO: 9051 - DNA, 84 bp, Artificial
  Barcode component
  misc_feature (33)..(34): n is a, c, g, or t
  misc_feature (43)..(44): n is a, c, g, or t
  misc_feature (53)..(54): n is a, c, g, or t
tttttttaagcagtggtatcaacgcagagtacnntcatgtccnncgtgttacnntttttttttttttttttttttttttttttt

SEQ ID NO: 9052 - DNA, 84 bp, Artificial
  Barcode component
  misc_feature (33)..(34): n is a, c, g, or t
  misc_feature (43)..(44): n is a, c, g, or t
  misc_feature (53)..(54): n is a, c, g, or t
tttttttaagcagtggtatcaacgcagagtacnntcatgtccnntagtgtgcnntttttttttttttttttttttttttttttt

SEQ ID NO: 9053 - DNA, 84 bp, Artificial
  Barcode component
  misc_feature (33)..(34): n is a, c, g, or t
  misc_feature (43)..(44): n is a, c, g, or t
  misc_feature (53)..(54): n is a, c, g, or t
tttttttaagcagtggtatcaacgcagagtacnntcatgtccnnctcatgacnntttttttttttttttttttttttttttttt

SEQ ID NO: 9054 - DNA, 84 bp, Artificial
  Barcode component
  misc_feature (33)..(34): n is a, c, g, or t
  misc_feature (43)..(44): n is a, c, g, or t
  misc_feature (53)..(54): n is a, c, g, or t
tttttttaagcagtggtatcaacgcagagtacnntcatgtccnngtatccagnntttttttttttttttttttttttttttttt

SEQ ID NO: 9055 - DNA, 84 bp, Artificial
  Barcode component
  misc_feature (33)..(34): n is a, c, g, or t
  misc_feature (43)..(44): n is a, c, g, or t
  misc_feature (53)..(54): n is a, c, g, or t
tttttttaagcagtggtatcaacgcagagtacnntcatgtccnnacgcctatnntttttttttttttttttttttttttttttt

SEQ ID NO: 9056 - DNA, 84 bp, Artificial
  Barcode component
  misc_feature (33)..(34): n is a, c, g, or t
  misc_feature (43)..(44): n is a, c, g, or t
  misc_feature (53)..(54): n is a, c, g, or t
tttttttaagcagtggtatcaacgcagagtacnntcatgtccnnaacgacctnntttttttttttttttttttttttttttttt

SEQ ID NO: 9057 - DNA, 84 bp, Artificial
  Barcode component
  misc_feature (33)..(34): n is a, c, g, or t
  misc_feature (43)..(44): n is a, c, g, or t
  misc_feature (53)..(54): n is a, c, g, or t
tttttttaagcagtggtatcaacgcagagtacnntcatgtccnnatcaggctnntttttttttttttttttttttttttttttt

SEQ ID NO: 9058 - DNA, 84 bp, Artificial
  Barcode component
  misc_feature (33)..(34): n is a, c, g, or t
  misc_feature (43)..(44): n is a, c, g, or t
  misc_feature (53)..(54): n is a, c, g, or t
tttttttaagcagtggtatcaacgcagagtacnntcatgtccnncaagttcgnntttttttttttttttttttttttttttttt

SEQ ID NO: 9059 - DNA, 84 bp, Artificial
  Barcode component
  misc_feature (33)..(34): n is a, c, g, or t
  misc_feature (43)..(44): n is a, c, g, or t
  misc_feature (53)..(54): n is a, c, g, or t
tttttttaagcagtggtatcaacgcagagtacnntcatgtccnntagccaganntttttttttttttttttttttttttttttt

SEQ ID NO: 9060 - DNA, 84 bp, Artificial
  Barcode component
  misc_feature (33)..(34): n is a, c, g, or t
  misc_feature (43)..(44): n is a, c, g, or t
  misc_feature (53)..(54): n is a, c, g, or t
tttttttaagcagtggtatcaacgcagagtacnntcatgtccnncaatcacgnntttttttttttttttttttttttttttttt

SEQ ID NO: 9061 - DNA, 84 bp, Artificial
  Barcode component
  misc_feature (33)..(34): n is a, c, g, or t
  misc_feature (43)..(44): n is a, c, g, or t
  misc_feature (53)..(54): n is a, c, g, or t
tttttttaagcagtggtatcaacgcagagtacnntcatgtccnngcaacaagnntttttttttttttttttttttttttttttt

SEQ ID NO: 9062 - DNA, 84 bp, Artificial
  Barcode component
  misc_feature (33)..(34): n is a, c, g, or t
  misc_feature (43)..(44): n is a, c, g, or t
  misc_feature (53)..(54): n is a, c, g, or t
tttttttaagcagtggtatcaacgcagagtacnntcatgtccnncacgacaanntttttttttttttttttttttttttttttt

SEQ ID NO: 9063 - DNA, 84 bp, Artificial
  Barcode component
  misc_feature (33)..(34): n is a, c, g, or t
  misc_feature (43)..(44): n is a, c, g, or t
  misc_feature (53)..(54): n is a, c, g, or t
tttttttaagcagtggtatcaacgcagagtacnntcatgtccnntacggaganntttttttttttttttttttttttttttttt

SEQ ID NO: 9064 - DNA, 84 bp, Artificial
  Barcode component
  misc_feature (33)..(34): n is a, c, g, or t
  misc_feature (43)..(44): n is a, c, g, or t
  misc_feature (53)..(54): n is a, c, g, or t
tttttttaagcagtggtatcaacgcagagtacnntcatgtccnncgacaaganntttttttttttttttttttttttttttttt

SEQ ID NO: 9065 - DNA, 84 bp, Artificial
  Barcode component
  misc_feature (33)..(34): n is a, c, g, or t
  misc_feature (43)..(44): n is a, c, g, or t
  misc_feature (53)..(54): n is a, c, g, or t
tttttttaagcagtggtatcaacgcagagtacnntcatgtccnncgaagtganntttttttttttttttttttttttttttttt

SEQ ID NO: 9066 - DNA, 84 bp, Artificial
  Barcode component
  misc_feature (33)..(34): n is a, c, g, or t
  misc_feature (43)..(44): n is a, c, g, or t
  misc_feature (53)..(54): n is a, c, g, or t
tttttttaagcagtggtatcaacgcagagtacnntcatgtccnnagctggtanntttttttttttttttttttttttttttttt

SEQ ID NO: 9067 - DNA, 84 bp, Artificial
  Barcode component
  misc_feature (33)..(34): n is a, c, g, or t
  misc_feature (43)..(44): n is a, c, g, or t
  misc_feature (53)..(54): n is a, c, g, or t
tttttttaagcagtggtatcaacgcagagtacnntcatgtccnnaactaggcnntttttttttttttttttttttttttttttt

SEQ ID NO: 9068 - DNA, 84 bp, Artificial
  Barcode component
  misc_feature (33)..(34): n is a, c, g, or t
  misc_feature (43)..(44): n is a, c, g, or t
  misc_feature (53)..(54): n is a, c, g, or t
tttttttaagcagtggtatcaacgcagagtacnntcatgtccnncagcaagtnntttttttttttttttttttttttttttttt

SEQ ID NO: 9069 - DNA, 84 bp, Artificial
  Barcode component
  misc_feature (33)..(34): n is a, c, g, or t
  misc_feature (43)..(44): n is a, c, g, or t
  misc_feature (53)..(54): n is a, c, g, or t
tttttttaagcagtggtatcaacgcagagtacnntcatgtccnnacgaggtanntttttttttttttttttttttttttttttt

SEQ ID NO: 9070 - DNA, 84 bp, Artificial
  Barcode component
  misc_feature (33)..(34): n is a, c, g, or t
  misc_feature (43)..(44): n is a, c, g, or t
  misc_feature (53)..(54): n is a, c, g, or t
tttttttaagcagtggtatcaacgcagagtacnntcatgtccnncatcttccnntttttttttttttttttttttttttttttt

SEQ ID NO: 9071 - DNA, 84 bp, Artificial
  Barcode component
  misc_feature (33)..(34): n is a, c, g, or t
  misc_feature (43)..(44): n is a, c, g, or t
  misc_feature (53)..(54): n is a, c, g, or t
tttttttaagcagtggtatcaacgcagagtacnntcatgtccnncctgaatcnntttttttttttttttttttttttttttttt

SEQ ID NO: 9072 - DNA, 84 bp, Artificial
  Barcode component
  misc_feature (33)..(34): n is a, c, g, or t
  misc_feature (43)..(44): n is a, c, g, or t
  misc_feature (53)..(54): n is a, c, g, or t
tttttttaagcagtggtatcaacgcagagtacnntcatgtccnntgcagactnntttttttttttttttttttttttttttttt

SEQ ID NO: 9073 - DNA, 84 bp, Artificial
  Barcode component
  misc_feature (33)..(34): n is a, c, g, or t
  misc_feature (43)..(44): n is a, c, g, or t
  misc_feature (53)..(54): n is a, c, g, or t
tttttttaagcagtggtatcaacgcagagtacnntcatgtccnnagatgtggnntttttttttttttttttttttttttttttt

SEQ ID NO: 9074 - DNA, 84 bp, Artificial
  Barcode component
  misc_feature (33)..(34): n is a, c, g, or t
  misc_feature (43)..(44): n is a, c, g, or t
  misc_feature (53)..(54): n is a, c, g, or t
tttttttaagcagtggtatcaacgcagagtacnntcatgtccnnagttcgacnntttttttttttttttttttttttttttttt

SEQ ID NO: 9075 - DNA, 84 bp, Artificial
  Barcode component
  misc_feature (33)..(34): n is a, c, g, or t
  misc_feature (43)..(44): n is a, c, g, or t
  misc_feature (53)..(54): n is a, c, g, or t
tttttttaagcagtggtatcaacgcagagtacnntcatgtccnnacaacctcnntttttttttttttttttttttttttttttt

SEQ ID NO: 9076 - DNA, 84 bp, Artificial
  Barcode component
  misc_feature (33)..(34): n is a, c, g, or t
  misc_feature (43)..(44): n is a, c, g, or t
  misc_feature (53)..(54): n is a, c, g, or t
tttttttaagcagtggtatcaacgcagagtacnntcatgtccnncatggtagnntttttttttttttttttttttttttttttt

SEQ ID NO: 9077 - DNA, 84 bp, Artificial
  Barcode component
  misc_feature (33)..(34): n is a, c, g, or t
  misc_feature (43)..(44): n is a, c, g, or t
  misc_feature (53)..(54): n is a, c, g, or t
tttttttaagcagtggtatcaacgcagagtacnntcatgtccnncgtatctcnntttttttttttttttttttttttttttttt

SEQ ID NO: 9078 - DNA, 84 bp, Artificial
  Barcode component
  misc_feature (33)..(34): n is a, c, g, or t
  misc_feature (43)..(44): n is a, c, g, or t
  misc_feature (53)..(54): n is a, c, g, or t
tttttttaagcagtggtatcaacgcagagtacnntcatgtccnncctagttcnntttttttttttttttttttttttttttttt

SEQ ID NO: 9079 - DNA, 84 bp, Artificial
  Barcode component
  misc_feature (33)..(34): n is a, c, g, or t
  misc_feature (43)..(44): n is a, c, g, or t
  misc_feature (53)..(54): n is a, c, g, or t
tttttttaagcagtggtatcaacgcagagtacnntcatgtccnncaagagtcnntttttttttttttttttttttttttttttt

SEQ ID NO: 9080 - DNA, 84 bp, Artificial
  Barcode component
  misc_feature (33)..(34): n is a, c, g, or t
  misc_feature (43)..(44): n is a, c, g, or t
  misc_feature (53)..(54): n is a, c, g, or t
tttttttaagcagtggtatcaacgcagagtacnnacaagaccnnaatcggcanntttttttttttttttttttttttttttttt

SEQ ID NO: 9081 - DNA, 84 bp, Artificial
  Barcode component
  misc_feature (33)..(34): n is a, c, g, or t
  misc_feature (43)..(44): n is a, c, g, or t
  misc_feature (53)..(54): n is a, c, g, or t
tttttttaagcagtggtatcaacgcagagtacnnacaagaccnntacggcatnntttttttttttttttttttttttttttttt

SEQ ID NO: 9082 - DNA, 84 bp, Artificial
  Barcode component
  misc_feature (33)..(34): n is a, c, g, or t
  misc_feature (43)..(44): n is a, c, g, or t
  misc_feature (53)..(54): n is a, c, g, or t
tttttttaagcagtggtatcaacgcagagtacnnacaagaccnnttggatcgnntttttttttttttttttttttttttttttt

SEQ ID NO: 9083 - DNA, 84 bp, Artificial
  Barcode component
  misc_feature (33)..(34): n is a, c, g, or t
  misc_feature (43)..(44): n is a, c, g, or t
  misc_feature (53)..(54): n is a, c, g, or t
tttttttaagcagtggtatcaacgcagagtacnnacaagaccnntggaacganntttttttttttttttttttttttttttttt

SEQ ID NO: 9084 - DNA, 84 bp, Artificial
  Barcode component
  misc_feature (33)..(34): n is a, c, g, or t
  misc_feature (43)..(44): n is a, c, g, or t
  misc_feature (53)..(54): n is a, c, g, or t
tttttttaagcagtggtatcaacgcagagtacnnacaagaccnnggcaatcanntttttttttttttttttttttttttttttt

SEQ ID NO: 9085 - DNA, 84 bp, Artificial
  Barcode component
  misc_feature (33)..(34): n is a, c, g, or t
  misc_feature (43)..(44): n is a, c, g, or t
  misc_feature (53)..(54): n is a, c, g, or t
tttttttaagcagtggtatcaacgcagagtacnnacaagaccnngaatccganntttttttttttttttttttttttttttttt

SEQ ID NO: 9086 - DNA, 84 bp, Artificial
  Barcode component
  misc_feature (33)..(34): n is a, c, g, or t
  misc_feature (43)..(44): n is a, c, g, or t
  misc_feature (53)..(54): n is a, c, g, or t
tttttttaagcagtggtatcaacgcagagtacnnacaagaccnnttacggtgnntttttttttttttttttttttttttttttt

SEQ ID NO: 9087 - DNA, 84 bp, Artificial
  Barcode component
  misc_feature (33)..(34): n is a, c, g, or t
  misc_feature (43)..(44): n is a, c, g, or t
  misc_feature (53)..(54): n is a, c, g, or t
tttttttaagcagtggtatcaacgcagagtacnnacaagaccnncatatcggnntttttttttttttttttttttttttttttt

SEQ ID NO: 9088 - DNA, 84 bp, Artificial
  Barcode component
  misc_feature (33)..(34): n is a, c, g, or t
  misc_feature (43)..(44): n is a, c, g, or t
  misc_feature (53)..(54): n is a, c, g, or t
tttttttaagcagtggtatcaacgcagagtacnnacaagaccnncttcggtanntttttttttttttttttttttttttttttt

SEQ ID NO: 9089 - DNA, 84 bp, Artificial
  Barcode component
  misc_feature (33)..(34): n is a, c, g, or t
  misc_feature (43)..(44): n is a, c, g, or t
  misc_feature (53)..(54): n is a, c, g, or t
tttttttaagcagtggtatcaacgcagagtacnnacaagaccnntcctaacgnntttttttttttttttttttttttttttttt

SEQ ID NO: 9090 - DNA, 84 bp, Artificial
  Barcode component
  misc_feature (33)..(34): n is a, c, g, or t
  misc_feature (43)..(44): n is a, c, g, or t
  misc_feature (53)..(54): n is a, c, g, or t
tttttttaagcagtggtatcaacgcagagtacnnacaagaccnngtaagccanntttttttttttttttttttttttttttttt

SEQ ID NO: 9091 - DNA, 84 bp, Artificial
  Barcode component
  misc_feature (33)..(34): n is a, c, g, or t
  misc_feature (43)..(44): n is a, c, g, or t
  misc_feature (53)..(54): n is a, c, g, or t
tttttttaagcagtggtatcaacgcagagtacnnacaagaccnntaaggtggnntttttttttttttttttttttttttttttt

SEQ ID NO: 9092 - DNA, 84 bp, Artificial
  Barcode component
  misc_feature (33)..(34): n is a, c, g, or t
  misc_feature (43)..(44): n is a, c, g, or t
  misc_feature (53)..(54): n is a, c, g, or t
tttttttaagcagtggtatcaacgcagagtacnnacaagaccnnggtaagctnntttttttttttttttttttttttttttttt

SEQ ID NO: 9093 - DNA, 84 bp, Artificial
  Barcode component
  misc_feature (33)..(34): n is a, c, g, or t
  misc_feature (43)..(44): n is a, c, g, or t
  misc_feature (53)..(54): n is a, c, g, or t
tttttttaagcagtggtatcaacgcagagtacnnacaagaccnntgtgtcganntttttttttttttttttttttttttttttt

SEQ ID NO: 9094 - DNA, 84 bp, Artificial
  Barcode component
  misc_feature (33)..(34): n is a, c, g, or t
  misc_feature (43)..(44): n is a, c, g, or t
  misc_feature (53)..(54): n is a, c, g, or t
tttttttaagcagtggtatcaacgcagagtacnnacaagaccnngagcatganntttttttttttttttttttttttttttttt

SEQ ID NO: 9095 - DNA, 84 bp, Artificial
  Barcode component
  misc_feature (33)..(34): n is a, c, g, or t
  misc_feature (43)..(44): n is a, c, g, or t
  misc_feature (53)..(54): n is a, c, g, or t
tttttttaagcagtggtatcaacgcagagtacnnacaagaccnntcgaagtcnntttttttttttttttttttttttttttttt

SEQ ID NO: 9096 - DNA, 84 bp, Artificial
  Barcode component
  misc_feature (33)..(34): n is a, c, g, or t
  misc_feature (43)..(44): n is a, c, g, or t
  misc_feature (53)..(54): n is a, c, g, or t
tttttttaagcagtggtatcaacgcagagtacnnacaagaccnnggtgaacanntttttttttttttttttttttttttttttt

SEQ ID NO: 9097 - DNA, 84 bp, Artificial
  Barcode component
  misc_feature (33)..(34): n is a, c, g, or t
  misc_feature (43)..(44): n is a, c, g, or t
  misc_feature (53)..(54): n is a, c, g, or t
tttttttaagcagtggtatcaacgcagagtacnnacaagaccnnacatgcacnntttttttttttttttttttttttttttttt

SEQ ID NO: 9098 - DNA, 84 bp, Artificial
  Barcode component
  misc_feature (33)..(34): n is a, c, g, or t
  misc_feature (43)..(44): n is a, c, g, or t
  misc_feature (53)..(54): n is a, c, g, or t
tttttttaagcagtggtatcaacgcagagtacnnacaagaccnnccaacagtnntttttttttttttttttttttttttttttt

SEQ ID NO: 9099 - DNA, 84 bp, Artificial
  Barcode component
  misc_feature (33)..(34): n is a, c, g, or t
  misc_feature (43)..(44): n is a, c, g, or t
  misc_feature (53)..(54): n is a, c, g, or t
tttttttaagcagtggtatcaacgcagagtacnnacaagaccnnagaacagcnntttttttttttttttttttttttttttttt

SEQ ID NO: 9100 - DNA, 84 bp, Artificial
  Barcode component
  misc_feature (33)..(34): n is a, c, g, or t
  misc_feature (43)..(44): n is a, c, g, or t
  misc_feature (53)..(54): n is a, c, g, or t
tttttttaagcagtggtatcaacgcagagtacnnacaagaccnngaacacgtnntttttttttttttttttttttttttttttt

SEQ ID NO: 9101 - DNA, 84 bp, Artificial
  Barcode component
  misc_feature (33)..(34): n is a, c, g, or t
  misc_feature (43)..(44): n is a, c, g, or t
  misc_feature (53)..(54): n is a, c, g, or t
tttttttaagcagtggtatcaacgcagagtacnnacaagaccnnggtcttcanntttttttttttttttttttttttttttttt

SEQ ID NO: 9102 - DNA, 84 bp, Artificial
  Barcode component
  misc_feature (33)..(34): n is a, c, g, or t
  misc_feature (43)..(44): n is a, c, g, or t
  misc_feature (53)..(54): n is a, c, g, or t
tttttttaagcagtggtatcaacgcagagtacnnacaagaccnnaggttcagnntttttttttttttttttttttttttttttt

SEQ ID NO: 9103 - DNA, 84 bp, Artificial
  Barcode component
  misc_feature (33)..(34): n is a, c, g, or t
  misc_feature (43)..(44): n is a, c, g, or t
  misc_feature (53)..(54): n is a, c, g, or t
tttttttaagcagtggtatcaacgcagagtacnnacaagaccnnctagagcanntttttttttttttttttttttttttttttt

SEQ ID NO: 9104 - DNA, 84 bp, Artificial
  Barcode component
  misc_feature (33)..(34): n is a, c, g, or t
  misc_feature (43)..(44): n is a, c, g, or t
  misc_feature (53)..(54): n is a, c, g, or t
tttttttaagcagtggtatcaacgcagagtacnnacaagaccnncttctagcnntttttttttttttttttttttttttttttt

SEQ ID NO: 9105 - DNA, 84 bp, Artificial
  Barcode component
  misc_feature (33)..(34): n is a, c, g, or t
  misc_feature (43)..(44): n is a, c, g, or t
  misc_feature (53)..(54): n is a, c, g, or t
tttttttaagcagtggtatcaacgcagagtacnnacaagaccnngagtaacgnntttttttttttttttttttttttttttttt

SEQ ID NO: 9106 - DNA, 84 bp, Artificial
  Barcode component
  misc_feature (33)..(34): n is a, c, g, or t
  misc_feature (43)..(44): n is a, c, g, or t
  misc_feature (53)..(54): n is a, c, g, or t
tttttttaagcagtggtatcaacgcagagtacnnacaagaccnnctaagaggnntttttttttttttttttttttttttttttt

SEQ ID NO: 9107 - DNA, 84 bp, Artificial
  Barcode component
  misc_feature (33)..(34): n is a, c, g, or t
  misc_feature (43)..(44): n is a, c, g, or t
  misc_feature (53)..(54): n is a, c, g, or t
tttttttaagcagtggtatcaacgcagagtacnnacaagaccnnacgtgtagnntttttttttttttttttttttttttttttt

SEQ ID NO: 9108 - DNA, 84 bp, Artificial
  Barcode component
  misc_feature (33)..(34): n is a, c, g, or t
  misc_feature (43)..(44): n is a, c, g, or t
  misc_feature (53)..(54): n is a, c, g, or t
tttttttaagcagtggtatcaacgcagagtacnnacaagaccnnactacaggnntttttttttttttttttttttttttttttt

SEQ ID NO: 9109 - DNA, 84 bp, Artificial
  Barcode component
  misc_feature (33)..(34): n is a, c, g, or t
  misc_feature (43)..(44): n is a, c, g, or t
  misc_feature (53)..(54): n is a, c, g, or t
tttttttaagcagtggtatcaacgcagagtacnnacaagaccnntacaggtcnntttttttttttttttttttttttttttttt

SEQ ID NO: 9110 - DNA, 84 bp, Artificial
  Barcode component
  misc_feature (33)..(34): n is a, c, g, or t
  misc_feature (43)..(44): n is a, c, g, or t
  misc_feature (53)..(54): n is a, c, g, or t
tttttttaagcagtggtatcaacgcagagtacnnacaagaccnnctcacatgnntttttttttttttttttttttttttttttt

SEQ ID NO: 9111 - DNA, 84 bp, Artificial
  Barcode component
  misc_feature (33)..(34): n is a, c, g, or t
  misc_feature (43)..(44): n is a, c, g, or t
  misc_feature (53)..(54): n is a, c, g, or t
tttttttaagcagtggtatcaacgcagagtacnnacaagaccnnactaggagnntttttttttttttttttttttttttttttt

SEQ ID NO: 9112 - DNA, 84 bp, Artificial
  Barcode component
  misc_feature (33)..(34): n is a, c, g, or t
  misc_feature (43)..(44): n is a, c, g, or t
  misc_feature (53)..(54): n is a, c, g, or t
tttttttaagcagtggtatcaacgcagagtacnnacaagaccnnccatagganntttttttttttttttttttttttttttttt

SEQ ID NO: 9113 - DNA, 84 bp, Artificial
  Barcode component
  misc_feature (33)..(34): n is a, c, g, or t
  misc_feature (43)..(44): n is a, c, g, or t
  misc_feature (53)..(54): n is a, c, g, or t
tttttttaagcagtggtatcaacgcagagtacnnacaagaccnnggagaatcnntttttttttttttttttttttttttttttt

SEQ ID NO: 9114 - DNA, 84 bp, Artificial
  Barcode component
  misc_feature (33)..(34): n is a, c, g, or t
  misc_feature (43)..(44): n is a, c, g, or t
  misc_feature (53)..(54): n is a, c, g, or t
tttttttaagcagtggtatcaacgcagagtacnnacaagaccnngccaagaanntttttttttttttttttttttttttttttt

SEQ ID NO: 9115 - DNA, 84 bp, Artificial
  Barcode component
  misc_feature (33)..(34): n is a, c, g, or t
  misc_feature (43)..(44): n is a, c, g, or t
  misc_feature (53)..(54): n is a, c, g, or t
tttttttaagcagtggtatcaacgcagagtacnnacaagaccnnaaggcaagnntttttttttttttttttttttttttttttt

SEQ ID NO: 9116 - DNA, 84 bp, Artificial
  Barcode component
  misc_feature (33)..(34): n is a, c, g, or t
  misc_feature (43)..(44): n is a, c, g, or t
  misc_feature (53)..(54): n is a, c, g, or t
tttttttaagcagtggtatcaacgcagagtacnnacaagaccnnaatgtcgcnntttttttttttttttttttttttttttttt

SEQ ID NO: 9117 - DNA, 84 bp, Artificial
  Barcode component
  misc_feature (33)..(34): n is a, c, g, or t
  misc_feature (43)..(44): n is a, c, g, or t
  misc_feature (53)..(54): n is a, c, g, or t
tttttttaagcagtggtatcaacgcagagtacnnacaagaccnnatggaaccnntttttttttttttttttttttttttttttt

SEQ ID NO: 9118 - DNA, 84 bp, Artificial
  Barcode component
  misc_feature (33)..(34): n is a, c, g, or t
  misc_feature (43)..(44): n is a, c, g, or t
  misc_feature (53)..(54): n is a, c, g, or t
tttttttaagcagtggtatcaacgcagagtacnnacaagaccnnagaggcatnntttttttttttttttttttttttttttttt

SEQ ID NO: 9119 - DNA, 84 bp, Artificial
  Barcode component
  misc_feature (33)..(34): n is a, c, g, or t
  misc_feature (43)..(44): n is a, c, g, or t
  misc_feature (53)..(54): n is a, c, g, or t
tttttttaagcagtggtatcaacgcagagtacnnacaagaccnntgcatagcnntttttttttttttttttttttttttttttt

SEQ ID NO: 9120 - DNA, 84 bp, Artificial
  Barcode component
  misc_feature (33)..(34): n is a, c, g, or t
  misc_feature (43)..(44): n is a, c, g, or t
  misc_feature (53)..(54): n is a, c, g, or t
tttttttaagcagtggtatcaacgcagagtacnnacaagaccnnctaacgganntttttttttttttttttttttttttttttt

SEQ ID NO: 9121 - DNA, 84 bp, Artificial
  Barcode component
  misc_feature (33)..(34): n is a, c, g, or t
  misc_feature (43)..(44): n is a, c, g, or t
  misc_feature (53)..(54): n is a, c, g, or t
tttttttaagcagtggtatcaacgcagagtacnnacaagaccnntatcgaggnntttttttttttttttttttttttttttttt

SEQ ID NO: 9122 - DNA, 84 bp, Artificial
  Barcode component
  misc_feature (33)..(34): n is a, c, g, or t
  misc_feature (43)..(44): n is a, c, g, or t
  misc_feature (53)..(54): n is a, c, g, or t
tttttttaagcagtggtatcaacgcagagtacnnacaagaccnncatagcctnntttttttttttttttttttttttttttttt

SEQ ID NO: 9123 - DNA, 84 bp, Artificial
  Barcode component
  misc_feature (33)..(34): n is a, c, g, or t
  misc_feature (43)..(44): n is a, c, g, or t
  misc_feature (53)..(54): n is a, c, g, or t
tttttttaagcagtggtatcaacgcagagtacnnacaagaccnnatcgagacnntttttttttttttttttttttttttttttt

SEQ ID NO: 9124 - DNA, 84 bp, Artificial
  Barcode component
  misc_feature (33)..(34): n is a, c, g, or t
  misc_feature (43)..(44): n is a, c, g, or t
  misc_feature (53)..(54): n is a, c, g, or t
tttttttaagcagtggtatcaacgcagagtacnnacaagaccnnggaagagtnntttttttttttttttttttttttttttttt

SEQ ID NO: 9125 - DNA, 84 bp, Artificial
  Barcode component
  misc_feature (33)..(34): n is a, c, g, or t
  misc_feature (43)..(44): n is a, c, g, or t
  misc_feature (53)..(54): n is a, c, g, or t
tttttttaagcagtggtatcaacgcagagtacnnacaagaccnnccaagtagnntttttttttttttttttttttttttttttt

SEQ ID NO: 9126 - DNA, 84 bp, Artificial
  Barcode component
  misc_feature (33)..(34): n is a, c, g, or t
  misc_feature (43)..(44): n is a, c, g, or t
  misc_feature (53)..(54): n is a, c, g, or t
tttttttaagcagtggtatcaacgcagagtacnnacaagaccnnctgaacagnntttttttttttttttttttttttttttttt

SEQ ID NO: 9127 - DNA, 84 bp, Artificial
  Barcode component
  misc_feature (33)..(34): n is a, c, g, or t
  misc_feature (43)..(44): n is a, c, g, or t
  misc_feature (53)..(54): n is a, c, g, or t
tttttttaagcagtggtatcaacgcagagtacnnacaagaccnngtaggttcnntttttttttttttttttttttttttttttt

SEQ ID NO: 9128 - DNA, 84 bp, Artificial
  Barcode component
  misc_feature (33)..(34): n is a, c, g, or t
  misc_feature (43)..(44): n is a, c, g, or t
  misc_feature (53)..(54): n is a, c, g, or t
tttttttaagcagtggtatcaacgcagagtacnnacaagaccnngtatggacnntttttttttttttttttttttttttttttt

SEQ ID NO: 9129 - DNA, 84 bp, Artificial
  Barcode component
  misc_feature (33)..(34): n is a, c, g, or t
  misc_feature (43)..(44): n is a, c, g, or t
  misc_feature (53)..(54): n is a, c, g, or t
tttttttaagcagtggtatcaacgcagagtacnnacaagaccnntcgcaacanntttttttttttttttttttttttttttttt

SEQ ID NO: 9130 - DNA, 84 bp, Artificial
  Barcode component
  misc_feature (33)..(34): n is a, c, g, or t
  misc_feature (43)..(44): n is a, c, g, or t
  misc_feature (53)..(54): n is a, c, g, or t
tttttttaagcagtggtatcaacgcagagtacnnacaagaccnnccgctaatnntttttttttttttttttttttttttttttt

SEQ ID NO: 9131 - DNA, 84 bp, Artificial
  Barcode component
  misc_feature (33)..(34): n is a, c, g, or t
  misc_feature (43)..(44): n is a, c, g, or t
  misc_feature (53)..(54): n is a, c, g, or t
tttttttaagcagtggtatcaacgcagagtacnnacaagaccnngattcgcanntttttttttttttttttttttttttttttt

SEQ ID NO: 9132 - DNA, 84 bp, Artificial
  Barcode component
  misc_feature (33)..(34): n is a, c, g, or t
  misc_feature (43)..(44): n is a, c, g, or t
  misc_feature (53)..(54): n is a, c, g, or t
tttttttaagcagtggtatcaacgcagagtacnnacaagaccnncgatggaanntttttttttttttttttttttttttttttt

SEQ ID NO: 9133 - DNA, 84 bp, Artificial
  Barcode component
  misc_feature (33)..(34): n is a, c, g, or t
  misc_feature (43)..(44): n is a, c, g, or t
  misc_feature (53)..(54): n is a, c, g, or t
tttttttaagcagtggtatcaacgcagagtacnnacaagaccnnagcaagganntttttttttttttttttttttttttttttt

SEQ ID NO: 9134 - DNA, 84 bp, Artificial
  Barcode component
  misc_feature (33)..(34): n is a, c, g, or t
  misc_feature (43)..(44): n is a, c, g, or t
  misc_feature (53)..(54): n is a, c, g, or t
tttttttaagcagtggtatcaacgcagagtacnnacaagaccnncgtagcaanntttttttttttttttttttttttttttttt

SEQ ID NO: 9135 - DNA, 84 bp, Artificial
  Barcode component
  misc_feature (33)..(34): n is a, c, g, or t
  misc_feature (43)..(44): n is a, c, g, or t
  misc_feature (53)..(54): n is a, c, g, or t
tttttttaagcagtggtatcaacgcagagtacnnacaagaccnntggcagtanntttttttttttttttttttttttttttttt

SEQ ID NO: 9136 - DNA, 84 bp, Artificial
  Barcode component
  misc_feature (33)..(34): n is a, c, g, or t
  misc_feature (43)..(44): n is a, c, g, or t
  misc_feature (53)..(54): n is a, c, g, or t
tttttttaagcagtggtatcaacgcagagtacnnacaagaccnncggtagttnntttttttttttttttttttttttttttttt

SEQ ID NO: 9137 - DNA, 84 bp, Artificial
  Barcode component
  misc_feature (33)..(34): n is a, c, g, or t
  misc_feature (43)..(44): n is a, c, g, or t
  misc_feature (53)..(54): n is a, c, g, or t
tttttttaagcagtggtatcaacgcagagtacnnacaagaccnntgacttcgnntttttttttttttttttttttttttttttt

SEQ ID NO: 9138 - DNA, 84 bp, Artificial
  Barcode component
  misc_feature (33)..(34): n is a, c, g, or t
  misc_feature (43)..(44): n is a, c, g, or t
  misc_feature (53)..(54): n is a, c, g, or t
tttttttaagcagtggtatcaacgcagagtacnnacaagaccnngagtgcaanntttttttttttttttttttttttttttttt

SEQ ID NO: 9139 - DNA, 84 bp, Artificial
  Barcode component
  misc_feature (33)..(34): n is a, c, g, or t
  misc_feature (43)..(44): n is a, c, g, or t
  misc_feature (53)..(54): n is a, c, g, or t
tttttttaagcagtggtatcaacgcagagtacnnacaagaccnnacggtaacnntttttttttttttttttttttttttttttt

SEQ ID NO: 9140 - DNA, 84 bp, Artificial
  Barcode component
  misc_feature (33)..(34): n is a, c, g, or t
  misc_feature (43)..(44): n is a, c, g, or t
  misc_feature (53)..(54): n is a, c, g, or t
tttttttaagcagtggtatcaacgcagagtacnnacaagaccnnaagtggtgnntttttttttttttttttttttttttttttt

SEQ ID NO: 9141 - DNA, 84 bp, Artificial
  Barcode component
  misc_feature (33)..(34): n is a, c, g, or t
  misc_feature (43)..(44): n is a, c, g, or t
  misc_feature (53)..(54): n is a, c, g, or t
tttttttaagcagtggtatcaacgcagagtacnnacaagaccnnggagacaanntttttttttttttttttttttttttttttt

SEQ ID NO: 9142 - DNA, 84 bp, Artificial
  Barcode component
  misc_feature (33)..(34): n is a, c, g, or t
  misc_feature (43)..(44): n is a, c, g, or t
  misc_feature (53)..(54): n is a, c, g, or t
tttttttaagcagtggtatcaacgcagagtacnnacaagaccnntcaaggacnntttttttttttttttttttttttttttttt

SEQ ID NO: 9143 - DNA, 84 bp, Artificial
  Barcode component
  misc_feature (33)..(34): n is a, c, g, or t
  misc_feature (43)..(44): n is a, c, g, or t
  misc_feature (53)..(54): n is a, c, g, or t
tttttttaagcagtggtatcaacgcagagtacnnacaagaccnnaagagagcnntttttttttttttttttttttttttttttt

SEQ ID NO: 9144 - DNA, 84 bp, Artificial
  Barcode component
  misc_feature (33)..(34): n is a, c, g, or t
  misc_feature (43)..(44): n is a, c, g, or t
  misc_feature (53)..(54): n is a, c, g, or t
tttttttaagcagtggtatcaacgcagagtacnnacaagaccnncgagagatnntttttttttttttttttttttttttttttt

SEQ ID NO: 9145 - DNA, 84 bp, Artificial
  Barcode component
  misc_feature (33)..(34): n is a, c, g, or t
  misc_feature (43)..(44): n is a, c, g, or t
  misc_feature (53)..(54): n is a, c, g, or t
tttttttaagcagtggtatcaacgcagagtacnnacaagaccnnacagatggnntttttttttttttttttttttttttttttt

SEQ ID NO: 9146 - DNA, 84 bp, Artificial
  Barcode component
  misc_feature (33)..(34): n is a, c, g, or t
  misc_feature (43)..(44): n is a, c, g, or t
  misc_feature (53)..(54): n is a, c, g, or t
tttttttaagcagtggtatcaacgcagagtacnnacaagaccnnaggagtcanntttttttttttttttttttttttttttttt

SEQ ID NO: 9147 - DNA, 84 bp, Artificial
  Barcode component
  misc_feature (33)..(34): n is a, c, g, or t
  misc_feature (43)..(44): n is a, c, g, or t
  misc_feature (53)..(54): n is a, c, g, or t
tttttttaagcagtggtatcaacgcagagtacnnacaagaccnncgtgttacnntttttttttttttttttttttttttttttt

SEQ ID NO: 9148 - DNA, 84 bp, Artificial
  Barcode component
  misc_feature (33)..(34): n is a, c, g, or t
  misc_feature (43)..(44): n is a, c, g, or t
  misc_feature (53)..(54): n is a, c, g, or t
tttttttaagcagtggtatcaacgcagagtacnnacaagaccnntagtgtgcnntttttttttttttttttttttttttttttt

SEQ ID NO: 9149 - DNA, 84 bp, Artificial
  Barcode component
  misc_feature (33)..(34): n is a, c, g, or t
  misc_feature (43)..(44): n is a, c, g, or t
  misc_feature (53)..(54): n is a, c, g, or t
tttttttaagcagtggtatcaacgcagagtacnnacaagaccnnctcatgacnntttttttttttttttttttttttttttttt

SEQ ID NO: 9150 - DNA, 84 bp, Artificial
  Barcode component
  misc_feature (33)..(34): n is a, c, g, or t
  misc_feature (43)..(44): n is a, c, g, or t
  misc_feature (53)..(54): n is a, c, g, or t
tttttttaagcagtggtatcaacgcagagtacnnacaagaccnngtatccagnntttttttttttttttttttttttttttttt

SEQ ID NO: 9151 - DNA, 84 bp, Artificial
  Barcode component
  misc_feature (33)..(34): n is a, c, g, or t
  misc_feature (43)..(44): n is a, c, g, or t
  misc_feature (53)..(54): n is a, c, g, or t
tttttttaagcagtggtatcaacgcagagtacnnacaagaccnnacgcctatnntttttttttttttttttttttttttttttt

SEQ ID NO: 9152 - DNA, 84 bp, Artificial
  Barcode component
  misc_feature (33)..(34): n is a, c, g, or t
  misc_feature (43)..(44): n is a, c, g, or t
  misc_feature (53)..(54): n is a, c, g, or t
tttttttaagcagtggtatcaacgcagagtacnnacaagaccnnaacgacctnntttttttttttttttttttttttttttttt

SEQ ID NO: 9153 - DNA, 84 bp, Artificial
  Barcode component
  misc_feature (33)..(34): n is a, c, g, or t
  misc_feature (43)..(44): n is a, c, g, or t
  misc_feature (53)..(54): n is a, c, g, or t
tttttttaagcagtggtatcaacgcagagtacnnacaagaccnnatcaggctnntttttttttttttttttttttttttttttt

SEQ ID NO: 9154 - DNA, 84 bp, Artificial
  Barcode component
  misc_feature (33)..(34): n is a, c, g, or t
  misc_feature (43)..(44): n is a, c, g, or t
  misc_feature (53)..(54): n is a, c, g, or t
tttttttaagcagtggtatcaacgcagagtacnnacaagaccnncaagttcgnntttttttttttttttttttttttttttttt

SEQ ID NO: 9155 - DNA, 84 bp, Artificial
  Barcode component
  misc_feature (33)..(34): n is a, c, g, or t
  misc_feature (43)..(44): n is a, c, g, or t
  misc_feature (53)..(54): n is a, c, g, or t
tttttttaagcagtggtatcaacgcagagtacnnacaagaccnntagccaganntttttttttttttttttttttttttttttt

SEQ ID NO: 9156 - DNA, 84 bp, Artificial
  Barcode component
  misc_feature (33)..(34): n is a, c, g, or t
  misc_feature (43)..(44): n is a, c, g, or t
  misc_feature (53)..(54): n is a, c, g, or t
tttttttaagcagtggtatcaacgcagagtacnnacaagaccnncaatcacgnntttttttttttttttttttttttttttttt

SEQ ID NO: 9157 - DNA, 84 bp, Artificial
  Barcode component
  misc_feature (33)..(34): n is a, c, g, or t
  misc_feature (43)..(44): n is a, c, g, or t
  misc_feature (53)..(54): n is a, c, g, or t
tttttttaagcagtggtatcaacgcagagtacnnacaagaccnngcaacaagnntttttttttttttttttttttttttttttt

SEQ ID NO: 9158 - DNA, 84 bp, Artificial
  Barcode component
  misc_feature (33)..(34): n is a, c, g, or t
  misc_feature (43)..(44): n is a, c, g, or t
  misc_feature (53)..(54): n is a, c, g, or t
tttttttaagcagtggtatcaacgcagagtacnnacaagaccnncacgacaanntttttttttttttttttttttttttttttt

SEQ ID NO: 9159 - DNA, 84 bp, Artificial
  Barcode component
  misc_feature (33)..(34): n is a, c, g, or t
  misc_feature (43)..(44): n is a, c, g, or t
  misc_feature (53)..(54): n is a, c, g, or t
tttttttaagcagtggtatcaacgcagagtacnnacaagaccnntacggaganntttttttttttttttttttttttttttttt

SEQ ID NO: 9160 - DNA, 84 bp, Artificial
  Barcode component
  misc_feature (33)..(34): n is a, c, g, or t
  misc_feature (43)..(44): n is a, c, g, or t
  misc_feature (53)..(54): n is a, c, g, or t
tttttttaagcagtggtatcaacgcagagtacnnacaagaccnncgacaaganntttttttttttttttttttttttttttttt

SEQ ID NO: 9161 - DNA, 84 bp, Artificial
  Barcode component
  misc_feature (33)..(34): n is a, c, g, or t
  misc_feature (43)..(44): n is a, c, g, or t
  misc_feature (53)..(54): n is a, c, g, or t
tttttttaagcagtggtatcaacgcagagtacnnacaagaccnncgaagtganntttttttttttttttttttttttttttttt

SEQ ID NO: 9162 - DNA, 84 bp, Artificial
  Barcode component
  misc_feature (33)..(34): n is a, c, g, or t
  misc_feature (43)..(44): n is a, c, g, or t
  misc_feature (53)..(54): n is a, c, g, or t
tttttttaagcagtggtatcaacgcagagtacnnacaagaccnnagctggtanntttttttttttttttttttttttttttttt

SEQ ID NO: 9163 - DNA, 84 bp, Artificial
  Barcode component
  misc_feature (33)..(34): n is a, c, g, or t
  misc_feature (43)..(44): n is a, c, g, or t
  misc_feature (53)..(54): n is a, c, g, or t
tttttttaagcagtggtatcaacgcagagtacnnacaagaccnnaactaggcnntttttttttttttttttttttttttttttt

SEQ ID NO: 9164 - DNA, 84 bp, Artificial
  Barcode component
  misc_feature (33)..(34): n is a, c, g, or t
  misc_feature (43)..(44): n is a, c, g, or t
  misc_feature (53)..(54): n is a, c, g, or t
tttttttaagcagtggtatcaacgcagagtacnnacaagaccnncagcaagtnntttttttttttttttttttttttttttttt

SEQ ID NO: 9165 - DNA, 84 bp, Artificial
  Barcode component
  misc_feature (33)..(34): n is a, c, g, or t
  misc_feature (43)..(44): n is a, c, g, or t
  misc_feature (53)..(54): n is a, c, g, or t
tttttttaagcagtggtatcaacgcagagtacnnacaagaccnnacgaggtanntttttttttttttttttttttttttttttt

SEQ ID NO: 9166 - DNA, 84 bp, Artificial
  Barcode component
  misc_feature (33)..(34): n is a, c, g, or t
  misc_feature (43)..(44): n is a, c, g, or t
  misc_feature (53)..(54): n is a, c, g, or t
tttttttaagcagtggtatcaacgcagagtacnnacaagaccnncatcttccnntttttttttttttttttttttttttttttt

SEQ ID NO: 9167 - DNA, 84 bp, Artificial
  Barcode component
  misc_feature (33)..(34): n is a, c, g, or t
  misc_feature (43)..(44): n is a, c, g, or t
  misc_feature (53)..(54): n is a, c, g, or t
tttttttaagcagtggtatcaacgcagagtacnnacaagaccnncctgaatcnntttttttttttttttttttttttttttttt

SEQ ID NO: 9168 - DNA, 84 bp, Artificial
  Barcode component
  misc_feature (33)..(34): n is a, c, g, or t
  misc_feature (43)..(44): n is a, c, g, or t
  misc_feature (53)..(54): n is a, c, g, or t
tttttttaagcagtggtatcaacgcagagtacnnacaagaccnntgcagactnntttttttttttttttttttttttttttttt

SEQ ID NO: 9169 - DNA, 84 bp, Artificial
  Barcode component
  misc_feature (33)..(34): n is a, c, g, or t
  misc_feature (43)..(44): n is a, c, g, or t
  misc_feature (53)..(54): n is a, c, g, or t
tttttttaagcagtggtatcaacgcagagtacnnacaagaccnnagatgtggnntttttttttttttttttttttttttttttt

SEQ ID NO: 9170 - DNA, 84 bp, Artificial
  Barcode component
  misc_feature (33)..(34): n is a, c, g, or t
  misc_feature (43)..(44): n is a, c, g, or t
  misc_feature (53)..(54): n is a, c, g, or t
tttttttaagcagtggtatcaacgcagagtacnnacaagaccnnagttcgacnntttttttttttttttttttttttttttttt

SEQ ID NO: 9171 - DNA, 84 bp, Artificial
  Barcode component
  misc_feature (33)..(34): n is a, c, g, or t
  misc_feature (43)..(44): n is a, c, g, or t
  misc_feature (53)..(54): n is a, c, g, or t
tttttttaagcagtggtatcaacgcagagtacnnacaagaccnnacaacctcnntttttttttttttttttttttttttttttt

SEQ ID NO: 9172 - DNA, 84 bp, Artificial
  Barcode component
  misc_feature (33)..(34): n is a, c, g, or t
  misc_feature (43)..(44): n is a, c, g, or t
  misc_feature (53)..(54): n is a, c, g, or t
tttttttaagcagtggtatcaacgcagagtacnnacaagaccnncatggtagnntttttttttttttttttttttttttttttt

SEQ ID NO: 9173 - DNA, 84 bp, Artificial
  Barcode component
  misc_feature (33)..(34): n is a, c, g, or t
  misc_feature (43)..(44): n is a, c, g, or t
  misc_feature (53)..(54): n is a, c, g, or t
tttttttaagcagtggtatcaacgcagagtacnnacaagaccnncgtatctcnntttttttttttttttttttttttttttttt

SEQ ID NO: 9174 - DNA, 84 bp, Artificial
  Barcode component
  misc_feature (33)..(34): n is a, c, g, or t
  misc_feature (43)..(44): n is a, c, g, or t
  misc_feature (53)..(54): n is a, c, g, or t
tttttttaagcagtggtatcaacgcagagtacnnacaagaccnncctagttcnntttttttttttttttttttttttttttttt

SEQ ID NO: 9175 - DNA, 84 bp, Artificial
  Barcode component
  misc_feature (33)..(34): n is a, c, g, or t
  misc_feature (43)..(44): n is a, c, g, or t
  misc_feature (53)..(54): n is a, c, g, or t
tttttttaagcagtggtatcaacgcagagtacnnacaagaccnncaagagtcnntttttttttttttttttttttttttttttt

SEQ ID NO: 9176 - DNA, 84 bp, Artificial
  Barcode component
  misc_feature (33)..(34): n is a, c, g, or t
  misc_feature (43)..(44): n is a, c, g, or t
  misc_feature (53)..(54): n is a, c, g, or t
tttttttaagcagtggtatcaacgcagagtacnngttagacgnnaatcggcanntttttttttttttttttttttttttttttt

SEQ ID NO: 9177 - DNA, 84 bp, Artificial
  Barcode component
  misc_feature (33)..(34): n is a, c, g, or t
  misc_feature (43)..(44): n is a, c, g, or t
  misc_feature (53)..(54): n is a, c, g, or t
tttttttaagcagtggtatcaacgcagagtacnngttagacgnntacggcatnntttttttttttttttttttttttttttttt

SEQ ID NO: 9178 - DNA, 84 bp, Artificial
  Barcode component
  misc_feature (33)..(34): n is a, c, g, or t
  misc_feature (43)..(44): n is a, c, g, or t
  misc_feature (53)..(54): n is a, c, g, or t
tttttttaagcagtggtatcaacgcagagtacnngttagacgnnttggatcgnntttttttttttttttttttttttttttttt

SEQ ID NO: 9179 - DNA, 84 bp, Artificial
  Barcode component
  misc_feature (33)..(34): n is a, c, g, or t
  misc_feature (43)..(44): n is a, c, g, or t
  misc_feature (53)..(54): n is a, c, g, or t
tttttttaagcagtggtatcaacgcagagtacnngttagacgnntggaacganntttttttttttttttttttttttttttttt

SEQ ID NO: 9180 - DNA, 84 bp, Artificial
  Barcode component
  misc_feature (33)..(34): n is a, c, g, or t
  misc_feature (43)..(44): n is a, c, g, or t
  misc_feature (53)..(54): n is a, c, g, or t
tttttttaagcagtggtatcaacgcagagtacnngttagacgnnggcaatcanntttttttttttttttttttttttttttttt

SEQ ID NO: 9181 - DNA, 84 bp, Artificial
  Barcode component
  misc_feature (33)..(34): n is a, c, g, or t
  misc_feature (43)..(44): n is a, c, g, or t
  misc_feature (53)..(54): n is a, c, g, or t
tttttttaagcagtggtatcaacgcagagtacnngttagacgnngaatccganntttttttttttttttttttttttttttttt

SEQ ID NO: 9182 - DNA, 84 bp, Artificial
  Barcode component
  misc_feature (33)..(34): n is a, c, g, or t
  misc_feature (43)..(44): n is a, c, g, or t
  misc_feature (53)..(54): n is a, c, g, or t
tttttttaagcagtggtatcaacgcagagtacnngttagacgnnttacggtgnntttttttttttttttttttttttttttttt

SEQ ID NO: 9183 - DNA, 84 bp, Artificial
  Barcode component
  misc_feature (33)..(34): n is a, c, g, or t
  misc_feature (43)..(44): n is a, c, g, or t
  misc_feature (53)..(54): n is a, c, g, or t
tttttttaagcagtggtatcaacgcagagtacnngttagacgnncatatcggnntttttttttttttttttttttttttttttt

SEQ ID NO: 9184 - DNA, 84 bp, Artificial
  Barcode component
  misc_feature (33)..(34): n is a, c, g, or t
  misc_feature (43)..(44): n is a, c, g, or t
  misc_feature (53)..(54): n is a, c, g, or t
tttttttaagcagtggtatcaacgcagagtacnngttagacgnncttcggtanntttttttttttttttttttttttttttttt

SEQ ID NO: 9185 - DNA, 84 bp, Artificial
  Barcode component
  misc_feature (33)..(34): n is a, c, g, or t
  misc_feature (43)..(44): n is a, c, g, or t
  misc_feature (53)..(54): n is a, c, g, or t
tttttttaagcagtggtatcaacgcagagtacnngttagacgnntcctaacgnntttttttttttttttttttttttttttttt

SEQ ID NO: 9186 - DNA, 84 bp, Artificial
  Barcode component
  misc_feature (33)..(34): n is a, c, g, or t
  misc_feature (43)..(44): n is a, c, g, or t
  misc_feature (53)..(54): n is a, c, g, or t
tttttttaagcagtggtatcaacgcagagtacnngttagacgnngtaagccanntttttttttttttttttttttttttttttt

SEQ ID NO: 9187 - DNA, 84 bp, Artificial
  Barcode component
  misc_feature (33)..(34): n is a, c, g, or t
  misc_feature (43)..(44): n is a, c, g, or t
  misc_feature (53)..(54): n is a, c, g, or t
tttttttaagcagtggtatcaacgcagagtacnngttagacgnntaaggtggnntttttttttttttttttttttttttttttt

SEQ ID NO: 9188 - DNA, 84 bp, Artificial
  Barcode component
  misc_feature (33)..(34): n is a, c, g, or t
  misc_feature (43)..(44): n is a, c, g, or t
  misc_feature (53)..(54): n is a, c, g, or t
tttttttaagcagtggtatcaacgcagagtacnngttagacgnnggtaagctnntttttttttttttttttttttttttttttt

SEQ ID NO: 9189 - DNA, 84 bp, Artificial
  Barcode component
  misc_feature (33)..(34): n is a, c, g, or t
  misc_feature (43)..(44): n is a, c, g, or t
  misc_feature (53)..(54): n is a, c, g, or t
tttttttaagcagtggtatcaacgcagagtacnngttagacgnntgtgtcganntttttttttttttttttttttttttttttt

SEQ ID NO: 9190 - DNA, 84 bp, Artificial
  Barcode component
  misc_feature (33)..(34): n is a, c, g, or t
  misc_feature (43)..(44): n is a, c, g, or t
  misc_feature (53)..(54): n is a, c, g, or t
tttttttaagcagtggtatcaacgcagagtacnngttagacgnngagcatganntttttttttttttttttttttttttttttt

SEQ ID NO: 9191 - DNA, 84 bp, Artificial
  Barcode component
  misc_feature (33)..(34): n is a, c, g, or t
  misc_feature (43)..(44): n is a, c, g, or t
  misc_feature (53)..(54): n is a, c, g, or t
tttttttaagcagtggtatcaacgcagagtacnngttagacgnntcgaagtcnntttttttttttttttttttttttttttttt

SEQ ID NO: 9192 - DNA, 84 bp, Artificial
  Barcode component
  misc_feature (33)..(34): n is a, c, g, or t
  misc_feature (43)..(44): n is a, c, g, or t
  misc_feature (53)..(54): n is a, c, g, or t
tttttttaagcagtggtatcaacgcagagtacnngttagacgnnggtgaacanntttttttttttttttttttttttttttttt

SEQ ID NO: 9193 - DNA, 84 bp, Artificial
  Barcode component
  misc_feature (33)..(34): n is a, c, g, or t
  misc_feature (43)..(44): n is a, c, g, or t
  misc_feature (53)..(54): n is a, c, g, or t
tttttttaagcagtggtatcaacgcagagtacnngttagacgnnacatgcacnntttttttttttttttttttttttttttttt

SEQ ID NO: 9194 - DNA, 84 bp, Artificial
  Barcode component
  misc_feature (33)..(34): n is a, c, g, or t
  misc_feature (43)..(44): n is a, c, g, or t
  misc_feature (53)..(54): n is a, c, g, or t
tttttttaagcagtggtatcaacgcagagtacnngttagacgnnccaacagtnntttttttttttttttttttttttttttttt

SEQ ID NO: 9195 - DNA, 84 bp, Artificial
  Barcode component
  misc_feature (33)..(34): n is a, c, g, or t
  misc_feature (43)..(44): n is a, c, g, or t
  misc_feature (53)..(54): n is a, c, g, or t
tttttttaagcagtggtatcaacgcagagtacnngttagacgnnagaacagcnntttttttttttttttttttttttttttttt

SEQ ID NO: 9196 - DNA, 84 bp, Artificial
  Barcode component
  misc_feature (33)..(34): n is a, c, g, or t
  misc_feature (43)..(44): n is a, c, g, or t
  misc_feature (53)..(54): n is a, c, g, or t
tttttttaagcagtggtatcaacgcagagtacnngttagacgnngaacacgtnntttttttttttttttttttttttttttttt

SEQ ID NO: 9197 - DNA, 84 bp, Artificial
  Barcode component
  misc_feature (33)..(34): n is a, c, g, or t
  misc_feature (43)..(44): n is a, c, g, or t
  misc_feature (53)..(54): n is a, c, g, or t
tttttttaagcagtggtatcaacgcagagtacnngttagacgnnggtcttcanntttttttttttttttttttttttttttttt

SEQ ID NO: 9198 - DNA, 84 bp, Artificial
  Barcode component
  misc_feature (33)..(34): n is a, c, g, or t
  misc_feature (43)..(44): n is a, c, g, or t
  misc_feature (53)..(54): n is a, c, g, or t
tttttttaagcagtggtatcaacgcagagtacnngttagacgnnaggttcagnntttttttttttttttttttttttttttttt

SEQ ID NO: 9199 - DNA, 84 bp, Artificial
  Barcode component
  misc_feature (33)..(34): n is a, c, g, or t
  misc_feature (43)..(44): n is a, c, g, or t
  misc_feature (53)..(54): n is a, c, g, or t
tttttttaagcagtggtatcaacgcagagtacnngttagacgnnctagagcanntttttttttttttttttttttttttttttt

SEQ ID NO: 9200 - DNA, 84 bp, Artificial
  Barcode component
  misc_feature (33)..(34): n is a, c, g, or t
  misc_feature (43)..(44): n is a, c, g, or t
  misc_feature (53)..(54): n is a, c, g, or t
tttttttaagcagtggtatcaacgcagagtacnngttagacgnncttctagcnntttttttttttttttttttttttttttttt

SEQ ID NO: 9201 - DNA, 84 bp, Artificial
  Barcode component
  misc_feature (33)..(34): n is a, c, g, or t
  misc_feature (43)..(44): n is a, c, g, or t
  misc_feature (53)..(54): n is a, c, g, or t
tttttttaagcagtggtatcaacgcagagtacnngttagacgnngagtaacgnntttttttttttttttttttttttttttttt

SEQ ID NO: 9202 - DNA, 84 bp, Artificial
  Barcode component
  misc_feature (33)..(34): n is a, c, g, or t
  misc_feature (43)..(44): n is a, c, g, or t
  misc_feature (53)..(54): n is a, c, g, or t
tttttttaagcagtggtatcaacgcagagtacnngttagacgnnctaagaggnntttttttttttttttttttttttttttttt

SEQ ID NO: 9203 - DNA, 84 bp, Artificial
  Barcode component
  misc_feature (33)..(34): n is a, c, g, or t
  misc_feature (43)..(44): n is a, c, g, or t
  misc_feature (53)..(54): n is a, c, g, or t
tttttttaagcagtggtatcaacgcagagtacnngttagacgnnacgtgtagnntttttttttttttttttttttttttttttt

SEQ ID NO: 9204 - DNA, 84 bp, Artificial
  Barcode component
  misc_feature (33)..(34): n is a, c, g, or t
  misc_feature (43)..(44): n is a, c, g, or t
  misc_feature (53)..(54): n is a, c, g, or t
tttttttaagcagtggtatcaacgcagagtacnngttagacgnnactacaggnntttttttttttttttttttttttttttttt

SEQ ID NO: 9205 - DNA, 84 bp, Artificial
  Barcode component
  misc_feature (33)..(34): n is a, c, g, or t
  misc_feature (43)..(44): n is a, c, g, or t
  misc_feature (53)..(54): n is a, c, g, or t
tttttttaagcagtggtatcaacgcagagtacnngttagacgnntacaggtcnntttttttttttttttttttttttttttttt

SEQ ID NO: 9206 - DNA, 84 bp, Artificial
  Barcode component
  misc_feature (33)..(34): n is a, c, g, or t
  misc_feature (43)..(44): n is a, c, g, or t
  misc_feature (53)..(54): n is a, c, g, or t
tttttttaagcagtggtatcaacgcagagtacnngttagacgnnctcacatgnntttttttttttttttttttttttttttttt

SEQ ID NO: 9207 - DNA, 84 bp, Artificial
  Barcode component
  misc_feature (33)..(34): n is a, c, g, or t
  misc_feature (43)..(44): n is a, c, g, or t
  misc_feature (53)..(54): n is a, c, g, or t
tttttttaagcagtggtatcaacgcagagtacnngttagacgnnactaggagnntttttttttttttttttttttttttttttt

SEQ ID NO: 9208 - DNA, 84 bp, Artificial
  Barcode component
  misc_feature (33)..(34): n is a, c, g, or t
  misc_feature (43)..(44): n is a, c, g, or t
  misc_feature (53)..(54): n is a, c, g, or t
tttttttaagcagtggtatcaacgcagagtacnngttagacgnnccatagganntttttttttttttttttttttttttttttt

SEQ ID NO: 9209 - DNA, 84 bp, Artificial
  Barcode component
  misc_feature (33)..(34): n is a, c, g, or t
  misc_feature (43)..(44): n is a, c, g, or t
  misc_feature (53)..(54): n is a, c, g, or t
tttttttaagcagtggtatcaacgcagagtacnngttagacgnnggagaatcnntttttttttttttttttttttttttttttt

SEQ ID NO: 9210 - DNA, 84 bp, Artificial
  Barcode component
  misc_feature (33)..(34): n is a, c, g, or t
  misc_feature (43)..(44): n is a, c, g, or t
  misc_feature (53)..(54): n is a, c, g, or t
tttttttaagcagtggtatcaacgcagagtacnngttagacgnngccaagaanntttttttttttttttttttttttttttttt

SEQ ID NO: 9211 - DNA, 84 bp, Artificial
  Barcode component
  misc_feature (33)..(34): n is a, c, g, or t
  misc_feature (43)..(44): n is a, c, g, or t
  misc_feature (53)..(54): n is a, c, g, or t
tttttttaagcagtggtatcaacgcagagtacnngttagacgnnaaggcaagnntttttttttttttttttttttttttttttt

SEQ ID NO: 9212 - DNA, 84 bp, Artificial
  Barcode component
  misc_feature (33)..(34): n is a, c, g, or t
  misc_feature (43)..(44): n is a, c, g, or t
  misc_feature (53)..(54): n is a, c, g, or t
tttttttaagcagtggtatcaacgcagagtacnngttagacgnnaatgtcgcnntttttttttttttttttttttttttttttt

SEQ ID NO: 9213 - DNA, 84 bp, Artificial
  Barcode component
  misc_feature (33)..(34): n is a, c, g, or t
  misc_feature (43)..(44): n is a, c, g, or t
  misc_feature (53)..(54): n is a, c, g, or t
tttttttaagcagtggtatcaacgcagagtacnngttagacgnnatggaaccnntttttttttttttttttttttttttttttt

SEQ ID NO: 9214 - DNA, 84 bp, Artificial
  Barcode component
  misc_feature (33)..(34): n is a, c, g, or t
  misc_feature (43)..(44): n is a, c, g, or t
  misc_feature (53)..(54): n is a, c, g, or t
tttttttaagcagtggtatcaacgcagagtacnngttagacgnnagaggcatnntttttttttttttttttttttttttttttt

SEQ ID NO: 9215 - DNA, 84 bp, Artificial
  Barcode component
  misc_feature (33)..(34): n is a, c, g, or t
  misc_feature (43)..(44): n is a, c, g, or t
  misc_feature (53)..(54): n is a, c, g, or t
tttttttaagcagtggtatcaacgcagagtacnngttagacgnntgcatagcnntttttttttttttttttttttttttttttt

SEQ ID NO: 9216 - DNA, 84 bp, Artificial
  Barcode component
  misc_feature (33)..(34): n is a, c, g, or t
  misc_feature (43)..(44): n is a, c, g, or t
  misc_feature (53)..(54): n is a, c, g, or t
tttttttaagcagtggtatcaacgcagagtacnngttagacgnnctaacgganntttttttttttttttttttttttttttttt

SEQ ID NO: 9217 - DNA, 84 bp, Artificial
  Barcode component
  misc_feature (33)..(34): n is a, c, g, or t
  misc_feature (43)..(44): n is a, c, g, or t
  misc_feature (53)..(54): n is a, c, g, or t
tttttttaagcagtggtatcaacgcagagtacnngttagacgnntatcgaggnntttttttttttttttttttttttttttttt

SEQ ID NO: 9218 - DNA, 84 bp, Artificial
  Barcode component
  misc_feature (33)..(34): n is a, c, g, or t
  misc_feature (43)..(44): n is a, c, g, or t
  misc_feature (53)..(54): n is a, c, g, or t
tttttttaagcagtggtatcaacgcagagtacnngttagacgnncatagcctnntttttttttttttttttttttttttttttt

SEQ ID NO: 9219 - DNA, 84 bp, Artificial
  Barcode component
  misc_feature (33)..(34): n is a, c, g, or t
  misc_feature (43)..(44): n is a, c, g, or t
  misc_feature (53)..(54): n is a, c, g, or t
tttttttaagcagtggtatcaacgcagagtacnngttagacgnnatcgagacnntttttttttttttttttttttttttttttt

SEQ ID NO: 9220 - DNA, 84 bp, Artificial
  Barcode component
  misc_feature (33)..(34): n is a, c, g, or t
  misc_feature (43)..(44): n is a, c, g, or t
  misc_feature (53)..(54): n is a, c, g, or t
tttttttaagcagtggtatcaacgcagagtacnngttagacgnnggaagagtnntttttttttttttttttttttttttttttt

SEQ ID NO: 9221 - DNA, 84 bp, Artificial
  Barcode component
  misc_feature (33)..(34): n is a, c, g, or t
  misc_feature (43)..(44): n is a, c, g, or t
  misc_feature (53)..(54): n is a, c, g, or t
tttttttaagcagtggtatcaacgcagagtacnngttagacgnnccaagtagnntttttttttttttttttttttttttttttt

SEQ ID NO: 9222 - DNA, 84 bp, Artificial
  Barcode component
  misc_feature (33)..(34): n is a, c, g, or t
  misc_feature (43)..(44): n is a, c, g, or t
  misc_feature (53)..(54): n is a, c, g, or t
tttttttaagcagtggtatcaacgcagagtacnngttagacgnnctgaacagnntttttttttttttttttttttttttttttt

SEQ ID NO: 9223 - DNA, 84 bp, Artificial
  Barcode component
  misc_feature (33)..(34): n is a, c, g, or t
  misc_feature (43)..(44): n is a, c, g, or t
  misc_feature (53)..(54): n is a, c, g, or t
tttttttaagcagtggtatcaacgcagagtacnngttagacgnngtaggttcnntttttttttttttttttttttttttttttt

SEQ ID NO: 9224 - DNA, 84 bp, Artificial
  Barcode component
  misc_feature (33)..(34): n is a, c, g, or t
  misc_feature (43)..(44): n is a, c, g, or t
  misc_feature (53)..(54): n is a, c, g, or t
tttttttaagcagtggtatcaacgcagagtacnngttagacgnngtatggacnntttttttttttttttttttttttttttttt

SEQ ID NO: 9225 - DNA, 84 bp, Artificial
  Barcode component
  misc_feature (33)..(34): n is a, c, g, or t
  misc_feature (43)..(44): n is a, c, g, or t
  misc_feature (53)..(54): n is a, c, g, or t
tttttttaagcagtggtatcaacgcagagtacnngttagacgnntcgcaacanntttttttttttttttttttttttttttttt

SEQ ID NO: 9226 - DNA, 84 bp, Artificial
  Barcode component
  misc_feature (33)..(34): n is a, c, g, or t
  misc_feature (43)..(44): n is a, c, g, or t
  misc_feature (53)..(54): n is a, c, g, or t
tttttttaagcagtggtatcaacgcagagtacnngttagacgnnccgctaatnntttttttttttttttttttttttttttttt

SEQ ID NO: 9227 - DNA, 84 bp, Artificial
  Barcode component
  misc_feature (33)..(34): n is a, c, g, or t
  misc_feature (43)..(44): n is a, c, g, or t
  misc_feature (53)..(54): n is a, c, g, or t
tttttttaagcagtggtatcaacgcagagtacnngttagacgnngattcgcanntttttttttttttttttttttttttttttt

SEQ ID NO: 9228 - DNA, 84 bp, Artificial
  Barcode component
  misc_feature (33)..(34): n is a, c, g, or t
  misc_feature (43)..(44): n is a, c, g, or t
  misc_feature (53)..(54): n is a, c, g, or t
tttttttaagcagtggtatcaacgcagagtacnngttagacgnncgatggaanntttttttttttttttttttttttttttttt

SEQ ID NO: 9229 - DNA, 84 bp, Artificial
  Barcode component
  misc_feature (33)..(34): n is a, c, g, or t
  misc_feature (43)..(44): n is a, c, g, or t
  misc_feature (53)..(54): n is a, c, g, or t
tttttttaagcagtggtatcaacgcagagtacnngttagacgnnagcaagganntttttttttttttttttttttttttttttt

SEQ ID NO: 9230 - DNA, 84 bp, Artificial
  Barcode component
  misc_feature (33)..(34): n is a, c, g, or t
  misc_feature (43)..(44): n is a, c, g, or t
  misc_feature (53)..(54): n is a, c, g, or t
tttttttaagcagtggtatcaacgcagagtacnngttagacgnncgtagcaanntttttttttttttttttttttttttttttt

SEQ ID NO: 9231 - DNA, 84 bp, Artificial
  Barcode component
  misc_feature (33)..(34): n is a, c, g, or t
  misc_feature (43)..(44): n is a, c, g, or t
  misc_feature (53)..(54): n is a, c, g, or t
tttttttaagcagtggtatcaacgcagagtacnngttagacgnntggcagtanntttttttttttttttttttttttttttttt

SEQ ID NO: 9232 - DNA, 84 bp, Artificial
  Barcode component
  misc_feature (33)..(34): n is a, c, g, or t
  misc_feature (43)..(44): n is a, c, g, or t
  misc_feature (53)..(54): n is a, c, g, or t
tttttttaagcagtggtatcaacgcagagtacnngttagacgnncggtagttnntttttttttttttttttttttttttttttt

SEQ ID NO: 9233 - DNA, 84 bp, Artificial
  Barcode component
  misc_feature (33)..(34): n is a, c, g, or t
  misc_feature (43)..(44): n is a, c, g, or t
  misc_feature (53)..(54): n is a, c, g, or t
tttttttaagcagtggtatcaacgcagagtacnngttagacgnntgacttcgnntttttttttttttttttttttttttttttt

SEQ ID NO: 9234 - DNA, 84 bp, Artificial
  Barcode component
  misc_feature (33)..(34): n is a, c, g, or t
  misc_feature (43)..(44): n is a, c, g, or t
  misc_feature (53)..(54): n is a, c, g, or t
tttttttaagcagtggtatcaacgcagagtacnngttagacgnngagtgcaanntttttttttttttttttttttttttttttt

SEQ ID NO: 9235 - DNA, 84 bp, Artificial
  Barcode component
  misc_feature (33)..(34): n is a, c, g, or t
  misc_feature (43)..(44): n is a, c, g, or t
  misc_feature (53)..(54): n is a, c, g, or t
tttttttaagcagtggtatcaacgcagagtacnngttagacgnnacggtaacnntttttttttttttttttttttttttttttt

SEQ ID NO: 9236 - DNA, 84 bp, Artificial
  Barcode component
  misc_feature (33)..(34): n is a, c, g, or t
  misc_feature (43)..(44): n is a, c, g, or t
  misc_feature (53)..(54): n is a, c, g, or t
tttttttaagcagtggtatcaacgcagagtacnngttagacgnnaagtggtgnntttttttttttttttttttttttttttttt

SEQ ID NO: 9237 - DNA, 84 bp, Artificial
  Barcode component
  misc_feature (33)..(34): n is a, c, g, or t
  misc_feature (43)..(44): n is a, c, g, or t
  misc_feature (53)..(54): n is a, c, g, or t
tttttttaagcagtggtatcaacgcagagtacnngttagacgnnggagacaanntttttttttttttttttttttttttttttt

SEQ ID NO: 9238 - DNA, 84 bp, Artificial
  Barcode component
  misc_feature (33)..(34): n is a, c, g, or t
  misc_feature (43)..(44): n is a, c, g, or t
  misc_feature (53)..(54): n is a, c, g, or t
tttttttaagcagtggtatcaacgcagagtacnngttagacgnntcaaggacnntttttttttttttttttttttttttttttt

SEQ ID NO: 9239 - DNA, 84 bp, Artificial
  Barcode component
  misc_feature (33)..(34): n is a, c, g, or t
  misc_feature (43)..(44): n is a, c, g, or t
  misc_feature (53)..(54): n is a, c, g, or t
tttttttaagcagtggtatcaacgcagagtacnngttagacgnnaagagagcnntttttttttttttttttttttttttttttt

SEQ ID NO: 9240 - DNA, 84 bp, Artificial
  Barcode component
  misc_feature (33)..(34): n is a, c, g, or t
  misc_feature (43)..(44): n is a, c, g, or t
  misc_feature (53)..(54): n is a, c, g, or t
tttttttaagcagtggtatcaacgcagagtacnngttagacgnncgagagatnntttttttttttttttttttttttttttttt

SEQ ID NO: 9241 - DNA, 84 bp, Artificial
  Barcode component
  misc_feature (33)..(34): n is a, c, g, or t
  misc_feature (43)..(44): n is a, c, g, or t
  misc_feature (53)..(54): n is a, c, g, or t
tttttttaagcagtggtatcaacgcagagtacnngttagacgnnacagatggnntttttttttttttttttttttttttttttt

SEQ ID NO: 9242 - DNA, 84 bp, Artificial
  Barcode component
  misc_feature (33)..(34): n is a, c, g, or t
  misc_feature (43)..(44): n is a, c, g, or t
  misc_feature (53)..(54): n is a, c, g, or t
tttttttaagcagtggtatcaacgcagagtacnngttagacgnnaggagtcanntttttttttttttttttttttttttttttt

SEQ ID NO: 9243 - DNA, 84 bp, Artificial
  Barcode component
  misc_feature (33)..(34): n is a, c, g, or t
  misc_feature (43)..(44): n is a, c, g, or t
  misc_feature (53)..(54): n is a, c, g, or t
tttttttaagcagtggtatcaacgcagagtacnngttagacgnncgtgttacnntttttttttttttttttttttttttttttt

SEQ ID NO: 9244 - DNA, 84 bp, Artificial
  Barcode component
  misc_feature (33)..(34): n is a, c, g, or t
  misc_feature (43)..(44): n is a, c, g, or t
  misc_feature (53)..(54): n is a, c, g, or t
tttttttaagcagtggtatcaacgcagagtacnngttagacgnntagtgtgcnntttttttttttttttttttttttttttttt

SEQ ID NO: 9245 - DNA, 84 bp, Artificial
  Barcode component
  misc_feature (33)..(34): n is a, c, g, or t
  misc_feature (43)..(44): n is a, c, g, or t
  misc_feature (53)..(54): n is a, c, g, or t
tttttttaagcagtggtatcaacgcagagtacnngttagacgnnctcatgacnntttttttttttttttttttttttttttttt

SEQ ID NO: 9246 - DNA, 84 bp, Artificial
  Barcode component
  misc_feature (33)..(34): n is a, c, g, or t
  misc_feature (43)..(44): n is a, c, g, or t
  misc_feature (53)..(54): n is a, c, g, or t
tttttttaagcagtggtatcaacgcagagtacnngttagacgnngtatccagnntttttttttttttttttttttttttttttt

SEQ ID NO: 9247 - DNA, 84 bp, Artificial
  Barcode component
  misc_feature (33)..(34): n is a, c, g, or t
  misc_feature (43)..(44): n is a, c, g, or t
  misc_feature (53)..(54): n is a, c, g, or t
tttttttaagcagtggtatcaacgcagagtacnngttagacgnnacgcctatnntttttttttttttttttttttttttttttt

SEQ ID NO: 9248 - DNA, 84 bp, Artificial
  Barcode component
  misc_feature (33)..(34): n is a, c, g, or t
  misc_feature (43)..(44): n is a, c, g, or t
  misc_feature (53)..(54): n is a, c, g, or t
tttttttaagcagtggtatcaacgcagagtacnngttagacgnnaacgacctnntttttttttttttttttttttttttttttt

SEQ ID NO: 9249 - DNA, 84 bp, Artificial
  Barcode component
  misc_feature (33)..(34): n is a, c, g, or t
  misc_feature (43)..(44): n is a, c, g, or t
  misc_feature (53)..(54): n is a, c, g, or t
tttttttaagcagtggtatcaacgcagagtacnngttagacgnnatcaggctnntttttttttttttttttttttttttttttt

SEQ ID NO: 9250 - DNA, 84 bp, Artificial
  Barcode component
  misc_feature (33)..(34): n is a, c, g, or t
  misc_feature (43)..(44): n is a, c, g, or t
  misc_feature (53)..(54): n is a, c, g, or t
tttttttaagcagtggtatcaacgcagagtacnngttagacgnncaagttcgnntttttttttttttttttttttttttttttt

SEQ ID NO: 9251 - DNA, 84 bp, Artificial
  Barcode component
  misc_feature (33)..(34): n is a, c, g, or t
  misc_feature (43)..(44): n is a, c, g, or t
  misc_feature (53)..(54): n is a, c, g, or t
tttttttaagcagtggtatcaacgcagagtacnngttagacgnntagccaganntttttttttttttttttttttttttttttt

SEQ ID NO: 9252 - DNA, 84 bp, Artificial
  Barcode component
  misc_feature (33)..(34): n is a, c, g, or t
  misc_feature (43)..(44): n is a, c, g, or t
  misc_feature (53)..(54): n is a, c, g, or t
tttttttaagcagtggtatcaacgcagagtacnngttagacgnncaatcacgnntttttttttttttttttttttttttttttt

SEQ ID NO: 9253 - DNA, 84 bp, Artificial
  Barcode component
  misc_feature (33)..(34): n is a, c, g, or t
  misc_feature (43)..(44): n is a, c, g, or t
  misc_feature (53)..(54): n is a, c, g, or t
tttttttaagcagtggtatcaacgcagagtacnngttagacgnngcaacaagnntttttttttttttttttttttttttttttt

SEQ ID NO: 9254 - DNA, 84 bp, Artificial
  Barcode component
  misc_feature (33)..(34): n is a, c, g, or t
  misc_feature (43)..(44): n is a, c, g, or t
  misc_feature (53)..(54): n is a, c, g, or t
tttttttaagcagtggtatcaacgcagagtacnngttagacgnncacgacaanntttttttttttttttttttttttttttttt

SEQ ID NO: 9255 - DNA, 84 bp, Artificial
  Barcode component
  misc_feature (33)..(34): n is a, c, g, or t
  misc_feature (43)..(44): n is a, c, g, or t
  misc_feature (53)..(54): n is a, c, g, or t
tttttttaagcagtggtatcaacgcagagtacnngttagacgnntacggaganntttttttttttttttttttttttttttttt

SEQ ID NO: 9256 - DNA, 84 bp, Artificial
  Barcode component
  misc_feature (33)..(34): n is a, c, g, or t
  misc_feature (43)..(44): n is a, c, g, or t
  misc_feature (53)..(54): n is a, c, g, or t
tttttttaagcagtggtatcaacgcagagtacnngttagacgnncgacaaganntttttttttttttttttttttttttttttt

SEQ ID NO: 9257 - DNA, 84 bp, Artificial
  Barcode component
  misc_feature (33)..(34): n is a, c, g, or t
  misc_feature (43)..(44): n is a, c, g, or t
  misc_feature (53)..(54): n is a, c, g, or t
tttttttaagcagtggtatcaacgcagagtacnngttagacgnncgaagtganntttttttttttttttttttttttttttttt

SEQ ID NO: 9258 - DNA, 84 bp, Artificial
  Barcode component
  misc_feature (33)..(34): n is a, c, g, or t
  misc_feature (43)..(44): n is a, c, g, or t
  misc_feature (53)..(54): n is a, c, g, or t
tttttttaagcagtggtatcaacgcagagtacnngttagacgnnagctggtanntttttttttttttttttttttttttttttt

SEQ ID NO: 9259 - DNA, 84 bp, Artificial
  Barcode component
  misc_feature (33)..(34): n is a, c, g, or t
  misc_feature (43)..(44): n is a, c, g, or t
  misc_feature (53)..(54): n is a, c, g, or t
tttttttaagcagtggtatcaacgcagagtacnngttagacgnnaactaggcnntttttttttttttttttttttttttttttt

SEQ ID NO: 9260 - DNA, 84 bp, Artificial
  Barcode component
  misc_feature (33)..(34): n is a, c, g, or t
  misc_feature (43)..(44): n is a, c, g, or t
  misc_feature (53)..(54): n is a, c, g, or t
tttttttaagcagtggtatcaacgcagagtacnngttagacgnncagcaagtnntttttttttttttttttttttttttttttt

SEQ ID NO: 9261 - DNA, 84 bp, Artificial
  Barcode component
  misc_feature (33)..(34): n is a, c, g, or t
  misc_feature (43)..(44): n is a, c, g, or t
  misc_feature (53)..(54): n is a, c, g, or t
tttttttaagcagtggtatcaacgcagagtacnngttagacgnnacgaggtanntttttttttttttttttttttttttttttt

SEQ ID NO: 9262 - DNA, 84 bp, Artificial
  Barcode component
  misc_feature (33)..(34): n is a, c, g, or t
  misc_feature (43)..(44): n is a, c, g, or t
  misc_feature (53)..(54): n is a, c, g, or t
tttttttaagcagtggtatcaacgcagagtacnngttagacgnncatcttccnntttttttttttttttttttttttttttttt

SEQ ID NO: 9263 - DNA, 84 bp, Artificial
  Barcode component
  misc_feature (33)..(34): n is a, c, g, or t
  misc_feature (43)..(44): n is a, c, g, or t
  misc_feature (53)..(54): n is a, c, g, or t
tttttttaagcagtggtatcaacgcagagtacnngttagacgnncctgaatcnntttttttttttttttttttttttttttttt

SEQ ID NO: 9264 - DNA, 84 bp, Artificial
  Barcode component
  misc_feature (33)..(34): n is a, c, g, or t
  misc_feature (43)..(44): n is a, c, g, or t
  misc_feature (53)..(54): n is a, c, g, or t
tttttttaagcagtggtatcaacgcagagtacnngttagacgnntgcagactnntttttttttttttttttttttttttttttt

SEQ ID NO: 9265 - DNA, 84 bp, Artificial
  Barcode component
  misc_feature (33)..(34): n is a, c, g, or t
  misc_feature (43)..(44): n is a, c, g, or t
  misc_feature (53)..(54): n is a, c, g, or t
tttttttaagcagtggtatcaacgcagagtacnngttagacgnnagatgtggnntttttttttttttttttttttttttttttt

SEQ ID NO: 9266 - DNA, 84 bp, Artificial
  Barcode component
  misc_feature (33)..(34): n is a, c, g, or t
  misc_feature (43)..(44): n is a, c, g, or t
  misc_feature (53)..(54): n is a, c, g, or t
tttttttaagcagtggtatcaacgcagagtacnngttagacgnnagttcgacnntttttttttttttttttttttttttttttt

SEQ ID NO: 9267 - DNA, 84 bp, Artificial
  Barcode component
  misc_feature (33)..(34): n is a, c, g, or t
  misc_feature (43)..(44): n is a, c, g, or t
  misc_feature (53)..(54): n is a, c, g, or t
tttttttaagcagtggtatcaacgcagagtacnngttagacgnnacaacctcnntttttttttttttttttttttttttttttt

SEQ ID NO: 9268 - DNA, 84 bp, Artificial
  Barcode component
  misc_feature (33)..(34): n is a, c, g, or t
  misc_feature (43)..(44): n is a, c, g, or t
  misc_feature (53)..(54): n is a, c, g, or t
tttttttaagcagtggtatcaacgcagagtacnngttagacgnncatggtagnntttttttttttttttttttttttttttttt

SEQ ID NO: 9269 - DNA, 84 bp, Artificial
  Barcode component
  misc_feature (33)..(34): n is a, c, g, or t
  misc_feature (43)..(44): n is a, c, g, or t
  misc_feature (53)..(54): n is a, c, g, or t
tttttttaagcagtggtatcaacgcagagtacnngttagacgnncgtatctcnntttttttttttttttttttttttttttttt

SEQ ID NO: 9270 - DNA, 84 bp, Artificial
  Barcode component
  misc_feature (33)..(34): n is a, c, g, or t
  misc_feature (43)..(44): n is a, c, g, or t
  misc_feature (53)..(54): n is a, c, g, or t
tttttttaagcagtggtatcaacgcagagtacnngttagacgnncctagttcnntttttttttttttttttttttttttttttt

SEQ ID NO: 9271 - DNA, 84 bp, Artificial
  Barcode component
  misc_feature (33)..(34): n is a, c, g, or t
  misc_feature (43)..(44): n is a, c, g, or t
  misc_feature (53)..(54): n is a, c, g, or t
tttttttaagcagtggtatcaacgcagagtacnngttagacgnncaagagtcnntttttttttttttttttttttttttttttt

SEQ ID NO: 9272 - DNA, 84 bp, Artificial
  Barcode component
  misc_feature (33)..(34): n is a, c, g, or t
  misc_feature (43)..(44): n is a, c, g, or t
  misc_feature (53)..(54): n is a, c, g, or t
tttttttaagcagtggtatcaacgcagagtacnnctggtgtannaatcggcanntttttttttttttttttttttttttttttt

SEQ ID NO: 9273 - DNA, 84 bp, Artificial
  Barcode component
  misc_feature (33)..(34): n is a, c, g, or t
  misc_feature (43)..(44): n is a, c, g, or t
  misc_feature (53)..(54): n is a, c, g, or t
tttttttaagcagtggtatcaacgcagagtacnnctggtgtanntacggcatnntttttttttttttttttttttttttttttt

SEQ ID NO: 9274 - DNA, 84 bp, Artificial
  Barcode component
  misc_feature (33)..(34): n is a, c, g, or t
  misc_feature (43)..(44): n is a, c, g, or t
  misc_feature (53)..(54): n is a, c, g, or t
tttttttaagcagtggtatcaacgcagagtacnnctggtgtannttggatcgnntttttttttttttttttttttttttttttt

SEQ ID NO: 9275 - DNA, 84 bp, Artificial
  Barcode component
  misc_feature (33)..(34): n is a, c, g, or t
  misc_feature (43)..(44): n is a, c, g, or t
  misc_feature (53)..(54): n is a, c, g, or t
tttttttaagcagtggtatcaacgcagagtacnnctggtgtanntggaacganntttttttttttttttttttttttttttttt

SEQ ID NO: 9276 - DNA, 84 bp, Artificial
  Barcode component
  misc_feature (33)..(34): n is a, c, g, or t
  misc_feature (43)..(44): n is a, c, g, or t
  misc_feature (53)..(54): n is a, c, g, or t
tttttttaagcagtggtatcaacgcagagtacnnctggtgtannggcaatcanntttttttttttttttttttttttttttttt

SEQ ID NO: 9277 - DNA, 84 bp, Artificial
  Barcode component
  misc_feature (33)..(34): n is a, c, g, or t
  misc_feature (43)..(44): n is a, c, g, or t
  misc_feature (53)..(54): n is a, c, g, or t
tttttttaagcagtggtatcaacgcagagtacnnctggtgtanngaatccganntttttttttttttttttttttttttttttt

SEQ ID NO: 9278 - DNA, 84 bp, Artificial
  Barcode component
  misc_feature (33)..(34): n is a, c, g, or t
  misc_feature (43)..(44): n is a, c, g, or t
  misc_feature (53)..(54): n is a, c, g, or t
tttttttaagcagtggtatcaacgcagagtacnnctggtgtannttacggtgnntttttttttttttttttttttttttttttt

SEQ ID NO: 9279 - DNA, 84 bp, Artificial
  Barcode component
  misc_feature (33)..(34): n is a, c, g, or t
  misc_feature (43)..(44): n is a, c, g, or t
  misc_feature (53)..(54): n is a, c, g, or t
tttttttaagcagtggtatcaacgcagagtacnnctggtgtanncatatcggnntttttttttttttttttttttttttttttt

SEQ ID NO: 9280 - DNA, 84 bp, Artificial
  Barcode component
  misc_feature (33)..(34): n is a, c, g, or t
  misc_feature (43)..(44): n is a, c, g, or t
  misc_feature (53)..(54): n is a, c, g, or t
tttttttaagcagtggtatcaacgcagagtacnnctggtgtanncttcggtanntttttttttttttttttttttttttttttt

SEQ ID NO: 9281 - DNA, 84 bp, Artificial
  Barcode component
  misc_feature (33)..(34): n is a, c, g, or t
  misc_feature (43)..(44): n is a, c, g, or t
  misc_feature (53)..(54): n is a, c, g, or t
tttttttaagcagtggtatcaacgcagagtacnnctggtgtanntcctaacgnntttttttttttttttttttttttttttttt

SEQ ID NO: 9282 - DNA, 84 bp, Artificial
  Barcode component
  misc_feature (33)..(34): n is a, c, g, or t
  misc_feature (43)..(44): n is a, c, g, or t
  misc_feature (53)..(54): n is a, c, g, or t
tttttttaagcagtggtatcaacgcagagtacnnctggtgtanngtaagccanntttttttttttttttttttttttttttttt

SEQ ID NO: 9283 - DNA, 84 bp, Artificial
  Barcode component
  misc_feature (33)..(34): n is a, c, g, or t
  misc_feature (43)..(44): n is a, c, g, or t
  misc_feature (53)..(54): n is a, c, g, or t
tttttttaagcagtggtatcaacgcagagtacnnctggtgtanntaaggtggnntttttttttttttttttttttttttttttt

SEQ ID NO: 9284 - DNA, 84 bp, Artificial
  Barcode component
  misc_feature (33)..(34): n is a, c, g, or t
  misc_feature (43)..(44): n is a, c, g, or t
  misc_feature (53)..(54): n is a, c, g, or t
tttttttaagcagtggtatcaacgcagagtacnnctggtgtannggtaagctnntttttttttttttttttttttttttttttt

SEQ ID NO: 9285 - DNA, 84 bp, Artificial
  Barcode component
  misc_feature (33)..(34): n is a, c, g, or t
  misc_feature (43)..(44): n is a, c, g, or t
  misc_feature (53)..(54): n is a, c, g, or t
tttttttaagcagtggtatcaacgcagagtacnnctggtgtanntgtgtcganntttttttttttttttttttttttttttttt

SEQ ID NO: 9286 - DNA, 84 bp, Artificial
  Barcode component
  misc_feature (33)..(34): n is a, c, g, or t
  misc_feature (43)..(44): n is a, c, g, or t
  misc_feature (53)..(54): n is a, c, g, or t
tttttttaagcagtggtatcaacgcagagtacnnctggtgtanngagcatganntttttttttttttttttttttttttttttt

SEQ ID NO: 9287 - DNA, 84 bp, Artificial
  Barcode component
  misc_feature (33)..(34): n is a, c, g, or t
  misc_feature (43)..(44): n is a, c, g, or t
  misc_feature (53)..(54): n is a, c, g, or t
tttttttaagcagtggtatcaacgcagagtacnnctggtgtanntcgaagtcnntttttttttttttttttttttttttttttt

SEQ ID NO: 9288 - DNA, 84 bp, Artificial
  Barcode component
  misc_feature (33)..(34): n is a, c, g, or t
  misc_feature (43)..(44): n is a, c, g, or t
  misc_feature (53)..(54): n is a, c, g, or t
tttttttaagcagtggtatcaacgcagagtacnnctggtgtannggtgaacanntttttttttttttttttttttttttttttt

SEQ ID NO: 9289 - DNA, 84 bp, Artificial
  Barcode component
  misc_feature (33)..(34): n is a, c, g, or t
  misc_feature (43)..(44): n is a, c, g, or t
  misc_feature (53)..(54): n is a, c, g, or t
tttttttaagcagtggtatcaacgcagagtacnnctggtgtannacatgcacnntttttttttttttttttttttttttttttt

SEQ ID NO: 9290 - DNA, 84 bp, Artificial
  Barcode component
  misc_feature (33)..(34): n is a, c, g, or t
  misc_feature (43)..(44): n is a, c, g, or t
  misc_feature (53)..(54): n is a, c, g, or t
tttttttaagcagtggtatcaacgcagagtacnnctggtgtannccaacagtnntttttttttttttttttttttttttttttt

SEQ ID NO: 9291 - DNA, 84 bp, Artificial
  Barcode component
  misc_feature (33)..(34): n is a, c, g, or t
  misc_feature (43)..(44): n is a, c, g, or t
  misc_feature (53)..(54): n is a, c, g, or t
tttttttaagcagtggtatcaacgcagagtacnnctggtgtannagaacagcnntttttttttttttttttttttttttttttt

SEQ ID NO: 9292 - DNA, 84 bp, Artificial
  Barcode component
  misc_feature (33)..(34): n is a, c, g, or t
  misc_feature (43)..(44): n is a, c, g, or t
  misc_feature (53)..(54): n is a, c, g, or t
tttttttaagcagtggtatcaacgcagagtacnnctggtgtanngaacacgtnntttttttttttttttttttttttttttttt

SEQ ID NO: 9293 - DNA, 84 bp, Artificial
  Barcode component
  misc_feature (33)..(34): n is a, c, g, or t
  misc_feature (43)..(44): n is a, c, g, or t
  misc_feature (53)..(54): n is a, c, g, or t
tttttttaagcagtggtatcaacgcagagtacnnctggtgtannggtcttcanntttttttttttttttttttttttttttttt

SEQ ID NO: 9294 - DNA, 84 bp, Artificial
  Barcode component
  misc_feature (33)..(34): n is a, c, g, or t
  misc_feature (43)..(44): n is a, c, g, or t
  misc_feature (53)..(54): n is a, c, g, or t
tttttttaagcagtggtatcaacgcagagtacnnctggtgtannaggttcagnntttttttttttttttttttttttttttttt

SEQ ID NO: 9295 - DNA, 84 bp, Artificial
  Barcode component
  misc_feature (33)..(34): n is a, c, g, or t
  misc_feature (43)..(44): n is a, c, g, or t
  misc_feature (53)..(54): n is a, c, g, or t
tttttttaagcagtggtatcaacgcagagtacnnctggtgtannctagagcanntttttttttttttttttttttttttttttt

SEQ ID NO: 9296 - DNA, 84 bp, Artificial
  Barcode component
  misc_feature (33)..(34): n is a, c, g, or t
  misc_feature (43)..(44): n is a, c, g, or t
  misc_feature (53)..(54): n is a, c, g, or t
tttttttaagcagtggtatcaacgcagagtacnnctggtgtanncttctagcnntttttttttttttttttttttttttttttt

SEQ ID NO: 9297 - DNA, 84 bp, Artificial
  Barcode component
  misc_feature (33)..(34): n is a, c, g, or t
  misc_feature (43)..(44): n is a, c, g, or t
  misc_feature (53)..(54): n is a, c, g, or t
tttttttaagcagtggtatcaacgcagagtacnnctggtgtanngagtaacgnntttttttttttttttttttttttttttttt

SEQ ID NO: 9298 - DNA, 84 bp, Artificial
  Barcode component
  misc_feature (33)..(34): n is a, c, g, or t
  misc_feature (43)..(44): n is a, c, g, or t
  misc_feature (53)..(54): n is a, c, g, or t
tttttttaagcagtggtatcaacgcagagtacnnctggtgtannctaagaggnntttttttttttttttttttttttttttttt

SEQ ID NO: 9299 - DNA, 84 bp, Artificial
  Barcode component
  misc_feature (33)..(34): n is a, c, g, or t
  misc_feature (43)..(44): n is a, c, g, or t
  misc_feature (53)..(54): n is a, c, g, or t
tttttttaagcagtggtatcaacgcagagtacnnctggtgtannacgtgtagnntttttttttttttttttttttttttttttt

SEQ ID NO: 9300 - DNA, 84 bp, Artificial
  Barcode component
  misc_feature (33)..(34): n is a, c, g, or t
  misc_feature (43)..(44): n is a, c, g, or t
  misc_feature (53)..(54): n is a, c, g, or t
tttttttaagcagtggtatcaacgcagagtacnnctggtgtannactacaggnntttttttttttttttttttttttttttttt

SEQ ID NO: 9301 - DNA, 84 bp, Artificial
  Barcode component
  misc_feature (33)..(34): n is a, c, g, or t
  misc_feature (43)..(44): n is a, c, g, or t
  misc_feature (53)..(54): n is a, c, g, or t
tttttttaagcagtggtatcaacgcagagtacnnctggtgtanntacaggtcnntttttttttttttttttttttttttttttt

SEQ ID NO: 9302 - DNA, 84 bp, Artificial
  Barcode component
  misc_feature (33)..(34): n is a, c, g, or t
  misc_feature (43)..(44): n is a, c, g, or t
  misc_feature (53)..(54): n is a, c, g, or t
tttttttaagcagtggtatcaacgcagagtacnnctggtgtannctcacatgnntttttttttttttttttttttttttttttt

SEQ ID NO: 9303 - DNA, 84 bp, Artificial
  Barcode component
  misc_feature (33)..(34): n is a, c, g, or t
  misc_feature (43)..(44): n is a, c, g, or t
  misc_feature (53)..(54): n is a, c, g, or t
tttttttaagcagtggtatcaacgcagagtacnnctggtgtannactaggagnntttttttttttttttttttttttttttttt

SEQ ID NO: 9304 - DNA, 84 bp, Artificial
  Barcode component
  misc_feature (33)..(34): n is a, c, g, or t
  misc_feature (43)..(44): n is a, c, g, or t
  misc_feature (53)..(54): n is a, c, g, or t
tttttttaagcagtggtatcaacgcagagtacnnctggtgtannccatagganntttttttttttttttttttttttttttttt

SEQ ID NO: 9305 - DNA, 84 bp, Artificial
  Barcode component
  misc_feature (33)..(34): n is a, c, g, or t
  misc_feature (43)..(44): n is a, c, g, or t
  misc_feature (53)..(54): n is a, c, g, or t
tttttttaagcagtggtatcaacgcagagtacnnctggtgtannggagaatcnntttttttttttttttttttttttttttttt

SEQ ID NO: 9306 - DNA, 84 bp, Artificial
  Barcode component
  misc_feature (33)..(34): n is a, c, g, or t
  misc_feature (43)..(44): n is a, c, g, or t
  misc_feature (53)..(54): n is a, c, g, or t
tttttttaagcagtggtatcaacgcagagtacnnctggtgtanngccaagaanntttttttttttttttttttttttttttttt

SEQ ID NO: 9307 - DNA, 84 bp, Artificial
  Barcode component
  misc_feature (33)..(34): n is a, c, g, or t
  misc_feature (43)..(44): n is a, c, g, or t
  misc_feature (53)..(54): n is a, c, g, or t
tttttttaagcagtggtatcaacgcagagtacnnctggtgtannaaggcaagnntttttttttttttttttttttttttttttt

SEQ ID NO: 9308 - DNA, 84 bp, Artificial
  Barcode component
  misc_feature (33)..(34): n is a, c, g, or t
  misc_feature (43)..(44): n is a, c, g, or t
  misc_feature (53)..(54): n is a, c, g, or t
tttttttaagcagtggtatcaacgcagagtacnnctggtgtannaatgtcgcnntttttttttttttttttttttttttttttt

SEQ ID NO: 9309 - DNA, 84 bp, Artificial
  Barcode component
  misc_feature (33)..(34): n is a, c, g, or t
  misc_feature (43)..(44): n is a, c, g, or t
  misc_feature (53)..(54): n is a, c, g, or t
tttttttaagcagtggtatcaacgcagagtacnnctggtgtannatggaaccnntttttttttttttttttttttttttttttt

SEQ ID NO: 9310 - DNA, 84 bp, Artificial
  Barcode component
  misc_feature (33)..(34): n is a, c, g, or t
  misc_feature (43)..(44): n is a, c, g, or t
  misc_feature (53)..(54): n is a, c, g, or t
tttttttaagcagtggtatcaacgcagagtacnnctggtgtannagaggcatnntttttttttttttttttttttttttttttt

SEQ ID NO: 9311 - DNA, 84 bp, Artificial
  Barcode component
  misc_feature (33)..(34): n is a, c, g, or t
  misc_feature (43)..(44): n is a, c, g, or t
  misc_feature (53)..(54): n is a, c, g, or t
tttttttaagcagtggtatcaacgcagagtacnnctggtgtanntgcatagcnntttttttttttttttttttttttttttttt

SEQ ID NO: 9312 - DNA, 84 bp, Artificial
  Barcode component
  misc_feature (33)..(34): n is a, c, g, or t
  misc_feature (43)..(44): n is a, c, g, or t
  misc_feature (53)..(54): n is a, c, g, or t
tttttttaagcagtggtatcaacgcagagtacnnctggtgtannctaacgganntttttttttttttttttttttttttttttt

SEQ ID NO: 9313 - DNA, 84 bp, Artificial
  Barcode component
  misc_feature (33)..(34): n is a, c, g, or t
  misc_feature (43)..(44): n is a, c, g, or t
  misc_feature (53)..(54): n is a, c, g, or t
tttttttaagcagtggtatcaacgcagagtacnnctggtgtanntatcgaggnntttttttttttttttttttttttttttttt

SEQ ID NO: 9314 - DNA, 84 bp, Artificial
  Barcode component
  misc_feature (33)..(34): n is a, c, g, or t
  misc_feature (43)..(44): n is a, c, g, or t
  misc_feature (53)..(54): n is a, c, g, or t
tttttttaagcagtggtatcaacgcagagtacnnctggtgtanncatagcctnntttttttttttttttttttttttttttttt

SEQ ID NO: 9315 - DNA, 84 bp, Artificial
  Barcode component
  misc_feature (33)..(34): n is a, c, g, or t
  misc_feature (43)..(44): n is a, c, g, or t
  misc_feature (53)..(54): n is a, c, g, or t
tttttttaagcagtggtatcaacgcagagtacnnctggtgtannatcgagacnntttttttttttttttttttttttttttttt

SEQ ID NO: 9316 - DNA, 84 bp, Artificial
  Barcode component
  misc_feature (33)..(34): n is a, c, g, or t
  misc_feature (43)..(44): n is a, c, g, or t
  misc_feature (53)..(54): n is a, c, g, or t
tttttttaagcagtggtatcaacgcagagtacnnctggtgtannggaagagtnntttttttttttttttttttttttttttttt

SEQ ID NO: 9317 - DNA, 84 bp, Artificial
  Barcode component
  misc_feature (33)..(34): n is a, c, g, or t
  misc_feature (43)..(44): n is a, c, g, or t
  misc_feature (53)..(54): n is a, c, g, or t
tttttttaagcagtggtatcaacgcagagtacnnctggtgtannccaagtagnntttttttttttttttttttttttttttttt

SEQ ID NO: 9318 - DNA, 84 bp, Artificial
  Barcode component
  misc_feature (33)..(34): n is a, c, g, or t
  misc_feature (43)..(44): n is a, c, g, or t
  misc_feature (53)..(54): n is a, c, g, or t
tttttttaagcagtggtatcaacgcagagtacnnctggtgtannctgaacagnntttttttttttttttttttttttttttttt

SEQ ID NO: 9319 - DNA, 84 bp, Artificial
  Barcode component
  misc_feature (33)..(34): n is a, c, g, or t
  misc_feature (43)..(44): n is a, c, g, or t
  misc_feature (53)..(54): n is a, c, g, or t
tttttttaagcagtggtatcaacgcagagtacnnctggtgtanngtaggttcnntttttttttttttttttttttttttttttt

SEQ ID NO: 9320 - DNA, 84 bp, Artificial
  Barcode component
  misc_feature (33)..(34): n is a, c, g, or t
  misc_feature (43)..(44): n is a, c, g, or t
  misc_feature (53)..(54): n is a, c, g, or t
tttttttaagcagtggtatcaacgcagagtacnnctggtgtanngtatggacnntttttttttttttttttttttttttttttt

SEQ ID NO: 9321 - DNA, 84 bp, Artificial
  Barcode component
  misc_feature (33)..(34): n is a, c, g, or t
  misc_feature (43)..(44): n is a, c, g, or t
  misc_feature (53)..(54): n is a, c, g, or t
tttttttaagcagtggtatcaacgcagagtacnnctggtgtanntcgcaacanntttttttttttttttttttttttttttttt

SEQ ID NO: 9322 - DNA, 84 bp, Artificial
  Barcode component
  misc_feature (33)..(34): n is a, c, g, or t
  misc_feature (43)..(44): n is a, c, g, or t
  misc_feature (53)..(54): n is a, c, g, or t
tttttttaagcagtggtatcaacgcagagtacnnctggtgtannccgctaatnntttttttttttttttttttttttttttttt

SEQ ID NO: 9323 - DNA, 84 bp, Artificial
  Barcode component
  misc_feature (33)..(34): n is a, c, g, or t
  misc_feature (43)..(44): n is a, c, g, or t
  misc_feature (53)..(54): n is a, c, g, or t
tttttttaagcagtggtatcaacgcagagtacnnctggtgtanngattcgcanntttttttttttttttttttttttttttttt

SEQ ID NO: 9324 - DNA, 84 bp, Artificial
  Barcode component
  misc_feature (33)..(34): n is a, c, g, or t
  misc_feature (43)..(44): n is a, c, g, or t
  misc_feature (53)..(54): n is a, c, g, or t
tttttttaagcagtggtatcaacgcagagtacnnctggtgtanncgatggaanntttttttttttttttttttttttttttttt

SEQ ID NO: 9325 - DNA, 84 bp, Artificial
  Barcode component
  misc_feature (33)..(34): n is a, c, g, or t
  misc_feature (43)..(44): n is a, c, g, or t
  misc_feature (53)..(54): n is a, c, g, or t
tttttttaagcagtggtatcaacgcagagtacnnctggtgtannagcaagganntttttttttttttttttttttttttttttt

SEQ ID NO: 9326 - DNA, 84 bp, Artificial
  Barcode component
  misc_feature (33)..(34): n is a, c, g, or t
  misc_feature (43)..(44): n is a, c, g, or t
  misc_feature (53)..(54): n is a, c, g, or t
tttttttaagcagtggtatcaacgcagagtacnnctggtgtanncgtagcaanntttttttttttttttttttttttttttttt

SEQ ID NO: 9327 - DNA, 84 bp, Artificial
  Barcode component
  misc_feature (33)..(34): n is a, c, g, or t
  misc_feature (43)..(44): n is a, c, g, or t
  misc_feature (53)..(54): n is a, c, g, or t
tttttttaagcagtggtatcaacgcagagtacnnctggtgtanntggcagtanntttttttttttttttttttttttttttttt

SEQ ID NO: 9328 - DNA, 84 bp, Artificial
  Barcode component
  misc_feature (33)..(34): n is a, c, g, or t
  misc_feature (43)..(44): n is a, c, g, or t
  misc_feature (53)..(54): n is a, c, g, or t
tttttttaagcagtggtatcaacgcagagtacnnctggtgtanncggtagttnntttttttttttttttttttttttttttttt

SEQ ID NO: 9329 - DNA, 84 bp, Artificial
  Barcode component
  misc_feature (33)..(34): n is a, c, g, or t
  misc_feature (43)..(44): n is a, c, g, or t
  misc_feature (53)..(54): n is a, c, g, or t
tttttttaagcagtggtatcaacgcagagtacnnctggtgtanntgacttcgnntttttttttttttttttttttttttttttt

SEQ ID NO: 9330 - DNA, 84 bp, Artificial
  Barcode component
  misc_feature (33)..(34): n is a, c, g, or t
  misc_feature (43)..(44): n is a, c, g, or t
  misc_feature (53)..(54): n is a, c, g, or t
tttttttaagcagtggtatcaacgcagagtacnnctggtgtanngagtgcaanntttttttttttttttttttttttttttttt

SEQ ID NO: 9331 - DNA, 84 bp, Artificial
  Barcode component
  misc_feature (33)..(34): n is a, c, g, or t
  misc_feature (43)..(44): n is a, c, g, or t
  misc_feature (53)..(54): n is a, c, g, or t
tttttttaagcagtggtatcaacgcagagtacnnctggtgtannacggtaacnntttttttttttttttttttttttttttttt

SEQ ID NO: 9332 - DNA, 84 bp, Artificial
  Barcode component
  misc_feature (33)..(34): n is a, c, g, or t
  misc_feature (43)..(44): n is a, c, g, or t
  misc_feature (53)..(54): n is a, c, g, or t
tttttttaagcagtggtatcaacgcagagtacnnctggtgtannaagtggtgnntttttttttttttttttttttttttttttt

SEQ ID NO: 9333 - DNA, 84 bp, Artificial
  Barcode component
  misc_feature (33)..(34): n is a, c, g, or t
  misc_feature (43)..(44): n is a, c, g, or t
  misc_feature (53)..(54): n is a, c, g, or t
tttttttaagcagtggtatcaacgcagagtacnnctggtgtannggagacaanntttttttttttttttttttttttttttttt

SEQ ID NO: 9334 - DNA, 84 bp, Artificial
  Barcode component
  misc_feature (33)..(34): n is a, c, g, or t
  misc_feature (43)..(44): n is a, c, g, or t
  misc_feature (53)..(54): n is a, c, g, or t
tttttttaagcagtggtatcaacgcagagtacnnctggtgtanntcaaggacnntttttttttttttttttttttttttttttt

SEQ ID NO: 9335 - DNA, 84 bp, Artificial
  Barcode component
  misc_feature (33)..(34): n is a, c, g, or t
  misc_feature (43)..(44): n is a, c, g, or t
  misc_feature (53)..(54): n is a, c, g, or t
tttttttaagcagtggtatcaacgcagagtacnnctggtgtannaagagagcnntttttttttttttttttttttttttttttt

SEQ ID NO: 9336 - DNA, 84 bp, Artificial
  Barcode component
  misc_feature (33)..(34): n is a, c, g, or t
  misc_feature (43)..(44): n is a, c, g, or t
  misc_feature (53)..(54): n is a, c, g, or t
tttttttaagcagtggtatcaacgcagagtacnnctggtgtanncgagagatnntttttttttttttttttttttttttttttt

SEQ ID NO: 9337 - DNA, 84 bp, Artificial
  Barcode component
  misc_feature (33)..(34): n is a, c, g, or t
  misc_feature (43)..(44): n is a, c, g, or t
  misc_feature (53)..(54): n is a, c, g, or t
tttttttaagcagtggtatcaacgcagagtacnnctggtgtannacagatggnntttttttttttttttttttttttttttttt

SEQ ID NO: 9338 - DNA, 84 bp, Artificial
  Barcode component
  misc_feature (33)..(34): n is a, c, g, or t
  misc_feature (43)..(44): n is a, c, g, or t
  misc_feature (53)..(54): n is a, c, g, or t
tttttttaagcagtggtatcaacgcagagtacnnctggtgtannaggagtcanntttttttttttttttttttttttttttttt

SEQ ID NO: 9339 - DNA, 84 bp, Artificial
  Barcode component
  misc_feature (33)..(34): n is a, c, g, or t
  misc_feature (43)..(44): n is a, c, g, or t
  misc_feature (53)..(54): n is a, c, g, or t
tttttttaagcagtggtatcaacgcagagtacnnctggtgtanncgtgttacnntttttttttttttttttttttttttttttt

SEQ ID NO: 9340 - DNA, 84 bp, Artificial
  Barcode component
  misc_feature (33)..(34): n is a, c, g, or t
  misc_feature (43)..(44): n is a, c, g, or t
  misc_feature (53)..(54): n is a, c, g, or t
tttttttaagcagtggtatcaacgcagagtacnnctggtgtanntagtgtgcnntttttttttttttttttttttttttttttt

SEQ ID NO: 9341 - DNA, 84 bp, Artificial
  Barcode component
  misc_feature (33)..(34): n is a, c, g, or t
  misc_feature (43)..(44): n is a, c, g, or t
  misc_feature (53)..(54): n is a, c, g, or t
tttttttaagcagtggtatcaacgcagagtacnnctggtgtannctcatgacnntttttttttttttttttttttttttttttt

SEQ ID NO: 9342 - DNA, 84 bp, Artificial
  Barcode component
  misc_feature (33)..(34): n is a, c, g, or t
  misc_feature (43)..(44): n is a, c, g, or t
  misc_feature (53)..(54): n is a, c, g, or t
tttttttaagcagtggtatcaacgcagagtacnnctggtgtanngtatccagnntttttttttttttttttttttttttttttt

SEQ ID NO: 9343 - DNA, 84 bp, Artificial
  Barcode component
  misc_feature (33)..(34): n is a, c, g, or t
  misc_feature (43)..(44): n is a, c, g, or t
  misc_feature (53)..(54): n is a, c, g, or t
tttttttaagcagtggtatcaacgcagagtacnnctggtgtannacgcctatnntttttttttttttttttttttttttttttt

SEQ ID NO: 9344 - DNA, 84 bp, Artificial
  Barcode component
  misc_feature (33)..(34): n is a, c, g, or t
  misc_feature (43)..(44): n is a, c, g, or t
  misc_feature (53)..(54): n is a, c, g, or t
tttttttaagcagtggtatcaacgcagagtacnnctggtgtannaacgacctnntttttttttttttttttttttttttttttt

SEQ ID NO: 9345 - DNA, 84 bp, Artificial
  Barcode component
  misc_feature (33)..(34): n is a, c, g, or t
  misc_feature (43)..(44): n is a, c, g, or t
  misc_feature (53)..(54): n is a, c, g, or t
tttttttaagcagtggtatcaacgcagagtacnnctggtgtannatcaggctnntttttttttttttttttttttttttttttt

SEQ ID NO: 9346 - DNA, 84 bp, Artificial
  Barcode component
  misc_feature (33)..(34): n is a, c, g, or t
  misc_feature (43)..(44): n is a, c, g, or t
  misc_feature (53)..(54): n is a, c, g, or t
tttttttaagcagtggtatcaacgcagagtacnnctggtgtanncaagttcgnntttttttttttttttttttttttttttttt

SEQ ID NO: 9347 - DNA, 84 bp, Artificial
  Barcode component
  misc_feature (33)..(34): n is a, c, g, or t
  misc_feature (43)..(44): n is a, c, g, or t
  misc_feature (53)..(54): n is a, c, g, or t
tttttttaagcagtggtatcaacgcagagtacnnctggtgtanntagccaganntttttttttttttttttttttttttttttt

SEQ ID NO: 9348 - DNA, 84 bp, Artificial
  Barcode component
  misc_feature (33)..(34): n is a, c, g, or t
  misc_feature (43)..(44): n is a, c, g, or t
  misc_feature (53)..(54): n is a, c, g, or t
tttttttaagcagtggtatcaacgcagagtacnnctggtgtanncaatcacgnntttttttttttttttttttttttttttttt

SEQ ID NO: 9349 - DNA, 84 bp, Artificial
  Barcode component
  misc_feature (33)..(34): n is a, c, g, or t
  misc_feature (43)..(44): n is a, c, g, or t
  misc_feature (53)..(54): n is a, c, g, or t
tttttttaagcagtggtatcaacgcagagtacnnctggtgtanngcaacaagnntttttttttttttttttttttttttttttt

SEQ ID NO: 9350 - DNA, 84 bp, Artificial
  Barcode component
  misc_feature (33)..(34): n is a, c, g, or t
  misc_feature (43)..(44): n is a, c, g, or t
  misc_feature (53)..(54): n is a, c, g, or t
tttttttaagcagtggtatcaacgcagagtacnnctggtgtanncacgacaanntttttttttttttttttttttttttttttt

SEQ ID NO: 9351 - DNA, 84 bp, Artificial
  Barcode component
  misc_feature (33)..(34): n is a, c, g, or t
  misc_feature (43)..(44): n is a, c, g, or t
  misc_feature (53)..(54): n is a, c, g, or t
tttttttaagcagtggtatcaacgcagagtacnnctggtgtanntacggaganntttttttttttttttttttttttttttttt

SEQ ID NO: 9352 - DNA, 84 bp, Artificial
  Barcode component
  misc_feature (33)..(34): n is a, c, g, or t
  misc_feature (43)..(44): n is a, c, g, or t
  misc_feature (53)..(54): n is a, c, g, or t
tttttttaagcagtggtatcaacgcagagtacnnctggtgtanncgacaaganntttttttttttttttttttttttttttttt

SEQ ID NO: 9353 - DNA, 84 bp, Artificial
  Barcode component
  misc_feature (33)..(34): n is a, c, g, or t
  misc_feature (43)..(44): n is a, c, g, or t
  misc_feature (53)..(54): n is a, c, g, or t
tttttttaagcagtggtatcaacgcagagtacnnctggtgtanncgaagtganntttttttttttttttttttttttttttttt

SEQ ID NO: 9354 - DNA, 84 bp, Artificial
  Barcode component
  misc_feature (33)..(34): n is a, c, g, or t
  misc_feature (43)..(44): n is a, c, g, or t
  misc_feature (53)..(54): n is a, c, g, or t
tttttttaagcagtggtatcaacgcagagtacnnctggtgtannagctggtanntttttttttttttttttttttttttttttt

SEQ ID NO: 9355 - DNA, 84 bp, Artificial
  Barcode component
  misc_feature (33)..(34): n is a, c, g, or t
  misc_feature (43)..(44): n is a, c, g, or t
  misc_feature (53)..(54): n is a, c, g, or t
tttttttaagcagtggtatcaacgcagagtacnnctggtgtannaactaggcnntttttttttttttttttttttttttttttt

SEQ ID NO: 9356 - DNA, 84 bp, Artificial
  Barcode component
  misc_feature (33)..(34): n is a, c, g, or t
  misc_feature (43)..(44): n is a, c, g, or t
  misc_feature (53)..(54): n is a, c, g, or t
tttttttaagcagtggtatcaacgcagagtacnnctggtgtanncagcaagtnntttttttttttttttttttttttttttttt

SEQ ID NO: 9357 - DNA, 84 bp, Artificial
  Barcode component
  misc_feature (33)..(34): n is a, c, g, or t
  misc_feature (43)..(44): n is a, c, g, or t
  misc_feature (53)..(54): n is a, c, g, or t
tttttttaagcagtggtatcaacgcagagtacnnctggtgtannacgaggtanntttttttttttttttttttttttttttttt

SEQ ID NO: 9358 - DNA, 84 bp, Artificial
  Barcode component
  misc_feature (33)..(34): n is a, c, g, or t
  misc_feature (43)..(44): n is a, c, g, or t
  misc_feature (53)..(54): n is a, c, g, or t
tttttttaagcagtggtatcaacgcagagtacnnctggtgtanncatcttccnntttttttttttttttttttttttttttttt

SEQ ID NO: 9359 - DNA, 84 bp, Artificial
  Barcode component
  misc_feature (33)..(34): n is a, c, g, or t
  misc_feature (43)..(44): n is a, c, g, or t
  misc_feature (53)..(54): n is a, c, g, or t
tttttttaagcagtggtatcaacgcagagtacnnctggtgtanncctgaatcnntttttttttttttttttttttttttttttt

SEQ ID NO: 9360 - DNA, 84 bp, Artificial
  Barcode component
  misc_feature (33)..(34): n is a, c, g, or t
  misc_feature (43)..(44): n is a, c, g, or t
  misc_feature (53)..(54): n is a, c, g, or t
tttttttaagcagtggtatcaacgcagagtacnnctggtgtanntgcagactnntttttttttttttttttttttttttttttt

SEQ ID NO: 9361 - DNA, 84 bp, Artificial
  Barcode component
  misc_feature (33)..(34): n is a, c, g, or t
  misc_feature (43)..(44): n is a, c, g, or t
  misc_feature (53)..(54): n is a, c, g, or t
tttttttaagcagtggtatcaacgcagagtacnnctggtgtannagatgtggnntttttttttttttttttttttttttttttt

SEQ ID NO: 9362 - DNA, 84 bp, Artificial
  Barcode component
  misc_feature (33)..(34): n is a, c, g, or t
  misc_feature (43)..(44): n is a, c, g, or t
  misc_feature (53)..(54): n is a, c, g, or t
tttttttaagcagtggtatcaacgcagagtacnnctggtgtannagttcgacnntttttttttttttttttttttttttttttt

SEQ ID NO: 9363 - DNA, 84 bp, Artificial
  Barcode component
  misc_feature (33)..(34): n is a, c, g, or t
  misc_feature (43)..(44): n is a, c, g, or t
  misc_feature (53)..(54): n is a, c, g, or t
tttttttaagcagtggtatcaacgcagagtacnnctggtgtannacaacctcnntttttttttttttttttttttttttttttt

SEQ ID NO: 9364 - DNA, 84 bp, Artificial
  Barcode component
  misc_feature (33)..(34): n is a, c, g, or t
  misc_feature (43)..(44): n is a, c, g, or t
  misc_feature (53)..(54): n is a, c, g, or t
tttttttaagcagtggtatcaacgcagagtacnnctggtgtanncatggtagnntttttttttttttttttttttttttttttt

SEQ ID NO: 9365 - DNA, 84 bp, Artificial
  Barcode component
  misc_feature (33)..(34): n is a, c, g, or t
  misc_feature (43)..(44): n is a, c, g, or t
  misc_feature (53)..(54): n is a, c, g, or t
tttttttaagcagtggtatcaacgcagagtacnnctggtgtanncgtatctcnntttttttttttttttttttttttttttttt

SEQ ID NO: 9366 - DNA, 84 bp, Artificial
  Barcode component
  misc_feature (33)..(34): n is a, c, g, or t
  misc_feature (43)..(44): n is a, c, g, or t
  misc_feature (53)..(54): n is a, c, g, or t
tttttttaagcagtggtatcaacgcagagtacnnctggtgtanncctagttcnntttttttttttttttttttttttttttttt

SEQ ID NO: 9367 - DNA, 84 bp, Artificial
  Barcode component
  misc_feature (33)..(34): n is a, c, g, or t
  misc_feature (43)..(44): n is a, c, g, or t
  misc_feature (53)..(54): n is a, c, g, or t
tttttttaagcagtggtatcaacgcagagtacnnctggtgtanncaagagtcnntttttttttttttttttttttttttttttt

SEQ ID NO: 9368 - DNA, 84 bp, Artificial
  Barcode component
  misc_feature (33)..(34): n is a, c, g, or t
  misc_feature (43)..(44): n is a, c, g, or t
  misc_feature (53)..(54): n is a, c, g, or t
tttttttaagcagtggtatcaacgcagagtacnntagacgacnnaatcggcanntttttttttttttttttttttttttttttt

SEQ ID NO: 9369 - DNA, 84 bp, Artificial
  Barcode component
  misc_feature (33)..(34): n is a, c, g, or t
  misc_feature (43)..(44): n is a, c, g, or t
  misc_feature (53)..(54): n is a, c, g, or t
tttttttaagcagtggtatcaacgcagagtacnntagacgacnntacggcatnntttttttttttttttttttttttttttttt

SEQ ID NO: 9370 - DNA, 84 bp, Artificial
  Barcode component
  misc_feature (33)..(34): n is a, c, g, or t
  misc_feature (43)..(44): n is a, c, g, or t
  misc_feature (53)..(54): n is a, c, g, or t
tttttttaagcagtggtatcaacgcagagtacnntagacgacnnttggatcgnntttttttttttttttttttttttttttttt

SEQ ID NO: 9371 - DNA, 84 bp, Artificial
  Barcode component
  misc_feature (33)..(34): n is a, c, g, or t
  misc_feature (43)..(44): n is a, c, g, or t
  misc_feature (53)..(54): n is a, c, g, or t
tttttttaagcagtggtatcaacgcagagtacnntagacgacnntggaacganntttttttttttttttttttttttttttttt

SEQ ID NO: 9372 - DNA, 84 bp, Artificial
  Barcode component
  misc_feature (33)..(34): n is a, c, g, or t
  misc_feature (43)..(44): n is a, c, g, or t
  misc_feature (53)..(54): n is a, c, g, or t
tttttttaagcagtggtatcaacgcagagtacnntagacgacnnggcaatcanntttttttttttttttttttttttttttttt

SEQ ID NO: 9373 - DNA, 84 bp, Artificial
  Barcode component
  misc_feature (33)..(34): n is a, c, g, or t
  misc_feature (43)..(44): n is a, c, g, or t
  misc_feature (53)..(54): n is a, c, g, or t
tttttttaagcagtggtatcaacgcagagtacnntagacgacnngaatccganntttttttttttttttttttttttttttttt

SEQ ID NO: 9374 - DNA, 84 bp, Artificial
  Barcode component
  misc_feature (33)..(34): n is a, c, g, or t
  misc_feature (43)..(44): n is a, c, g, or t
  misc_feature (53)..(54): n is a, c, g, or t
tttttttaagcagtggtatcaacgcagagtacnntagacgacnnttacggtgnntttttttttttttttttttttttttttttt

SEQ ID NO: 9375 - DNA, 84 bp, Artificial
  Barcode component
  misc_feature (33)..(34): n is a, c, g, or t
  misc_feature (43)..(44): n is a, c, g, or t
  misc_feature (53)..(54): n is a, c, g, or t
tttttttaagcagtggtatcaacgcagagtacnntagacgacnncatatcggnntttttttttttttttttttttttttttttt

SEQ ID NO: 9376 - DNA, 84 bp, Artificial
  Barcode component
  misc_feature (33)..(34): n is a, c, g, or t
  misc_feature (43)..(44): n is a, c, g, or t
  misc_feature (53)..(54): n is a, c, g, or t
tttttttaagcagtggtatcaacgcagagtacnntagacgacnncttcggtanntttttttttttttttttttttttttttttt

SEQ ID NO: 9377 - DNA, 84 bp, Artificial
  Barcode component
  misc_feature (33)..(34): n is a, c, g, or t
  misc_feature (43)..(44): n is a, c, g, or t
  misc_feature (53)..(54): n is a, c, g, or t
tttttttaagcagtggtatcaacgcagagtacnntagacgacnntcctaacgnntttttttttttttttttttttttttttttt

SEQ ID NO: 9378 - DNA, 84 bp, Artificial
  Barcode component
  misc_feature (33)..(34): n is a, c, g, or t
  misc_feature (43)..(44): n is a, c, g, or t
  misc_feature (53)..(54): n is a, c, g, or t
tttttttaagcagtggtatcaacgcagagtacnntagacgacnngtaagccanntttttttttttttttttttttttttttttt

SEQ ID NO: 9379 - DNA, 84 bp, Artificial
  Barcode component
  misc_feature (33)..(34): n is a, c, g, or t
  misc_feature (43)..(44): n is a, c, g, or t
  misc_feature (53)..(54): n is a, c, g, or t
tttttttaagcagtggtatcaacgcagagtacnntagacgacnntaaggtggnntttttttttttttttttttttttttttttt

SEQ ID NO: 9380 - DNA, 84 bp, Artificial
  Barcode component
  misc_feature (33)..(34): n is a, c, g, or t
  misc_feature (43)..(44): n is a, c, g, or t
  misc_feature (53)..(54): n is a, c, g, or t
tttttttaagcagtggtatcaacgcagagtacnntagacgacnnggtaagctnntttttttttttttttttttttttttttttt

SEQ ID NO: 9381 - DNA, 84 bp, Artificial
  Barcode component
  misc_feature (33)..(34): n is a, c, g, or t
  misc_feature (43)..(44): n is a, c, g, or t
  misc_feature (53)..(54): n is a, c, g, or t
tttttttaagcagtggtatcaacgcagagtacnntagacgacnntgtgtcganntttttttttttttttttttttttttttttt

SEQ ID NO: 9382 - DNA, 84 bp, Artificial
  Barcode component
  misc_feature (33)..(34): n is a, c, g, or t
  misc_feature (43)..(44): n is a, c, g, or t
  misc_feature (53)..(54): n is a, c, g, or t
tttttttaagcagtggtatcaacgcagagtacnntagacgacnngagcatganntttttttttttttttttttttttttttttt

SEQ ID NO: 9383 - DNA, 84 bp, Artificial
  Barcode component
  misc_feature (33)..(34): n is a, c, g, or t
  misc_feature (43)..(44): n is a, c, g, or t
  misc_feature (53)..(54): n is a, c, g, or t
tttttttaagcagtggtatcaacgcagagtacnntagacgacnntcgaagtcnntttttttttttttttttttttttttttttt

SEQ ID NO: 9384 - DNA, 84 bp, Artificial
  Barcode component
  misc_feature (33)..(34): n is a, c, g, or t
  misc_feature (43)..(44): n is a, c, g, or t
  misc_feature (53)..(54): n is a, c, g, or t
tttttttaagcagtggtatcaacgcagagtacnntagacgacnnggtgaacanntttttttttttttttttttttttttttttt

SEQ ID NO: 9385 - DNA, 84 bp, Artificial
  Barcode component
  misc_feature (33)..(34): n is a, c, g, or t
  misc_feature (43)..(44): n is a, c, g, or t
  misc_feature (53)..(54): n is a, c, g, or t
tttttttaagcagtggtatcaacgcagagtacnntagacgacnnacatgcacnntttttttttttttttttttttttttttttt

SEQ ID NO: 9386 - DNA, 84 bp, Artificial
  Barcode component
  misc_feature (33)..(34): n is a, c, g, or t
  misc_feature (43)..(44): n is a, c, g, or t
  misc_feature (53)..(54): n is a, c, g, or t
tttttttaagcagtggtatcaacgcagagtacnntagacgacnnccaacagtnntttttttttttttttttttttttttttttt

SEQ ID NO: 9387 - DNA, 84 bp, Artificial
  Barcode component
  misc_feature (33)..(34): n is a, c, g, or t
  misc_feature (43)..(44): n is a, c, g, or t
  misc_feature (53)..(54): n is a, c, g, or t
tttttttaagcagtggtatcaacgcagagtacnntagacgacnnagaacagcnntttttttttttttttttttttttttttttt

SEQ ID NO: 9388 - DNA, 84 bp, Artificial
  Barcode component
  misc_feature (33)..(34): n is a, c, g, or t
  misc_feature (43)..(44): n is a, c, g, or t
  misc_feature (53)..(54): n is a, c, g, or t
tttttttaagcagtggtatcaacgcagagtacnntagacgacnngaacacgtnntttttttttttttttttttttttttttttt

SEQ ID NO: 9389 - DNA, 84 bp, Artificial
  Barcode component
  misc_feature (33)..(34): n is a, c, g, or t
  misc_feature (43)..(44): n is a, c, g, or t
  misc_feature (53)..(54): n is a, c, g, or t
tttttttaagcagtggtatcaacgcagagtacnntagacgacnnggtcttcanntttttttttttttttttttttttttttttt

SEQ ID NO: 9390 - DNA, 84 bp, Artificial
  Barcode component
  misc_feature (33)..(34): n is a, c, g, or t
  misc_feature (43)..(44): n is a, c, g, or t
  misc_feature (53)..(54): n is a, c, g, or t
tttttttaagcagtggtatcaacgcagagtacnntagacgacnnaggttcagnntttttttttttttttttttttttttttttt

SEQ ID NO: 9391 - DNA, 84 bp, Artificial
  Barcode component
  misc_feature (33)..(34): n is a, c, g, or t
  misc_feature (43)..(44): n is a, c, g, or t
  misc_feature (53)..(54): n is a, c, g, or t
tttttttaagcagtggtatcaacgcagagtacnntagacgacnnctagagcanntttttttttttttttttttttttttttttt

SEQ ID NO: 9392 - DNA, 84 bp, Artificial
  Barcode component
  misc_feature (33)..(34): n is a, c, g, or t
  misc_feature (43)..(44): n is a, c, g, or t
  misc_feature (53)..(54): n is a, c, g, or t
tttttttaagcagtggtatcaacgcagagtacnntagacgacnncttctagcnntttttttttttttttttttttttttttttt

SEQ ID NO: 9393 - DNA, 84 bp, Artificial
  Barcode component
  misc_feature (33)..(34): n is a, c, g, or t
  misc_feature (43)..(44): n is a, c, g, or t
  misc_feature (53)..(54): n is a, c, g, or t
tttttttaagcagtggtatcaacgcagagtacnntagacgacnngagtaacgnntttttttttttttttttttttttttttttt

SEQ ID NO: 9394 - DNA, 84 bp, Artificial
  Barcode component
  misc_feature (33)..(34): n is a, c, g, or t
  misc_feature (43)..(44): n is a, c, g, or t
  misc_feature (53)..(54): n is a, c, g, or t
tttttttaagcagtggtatcaacgcagagtacnntagacgacnnctaagaggnntttttttttttttttttttttttttttttt

SEQ ID NO: 9395 - DNA, 84 bp, Artificial
  Barcode component
  misc_feature (33)..(34): n is a, c, g, or t
  misc_feature (43)..(44): n is a, c, g, or t
  misc_feature (53)..(54): n is a, c, g, or t
tttttttaagcagtggtatcaacgcagagtacnntagacgacnnacgtgtagnntttttttttttttttttttttttttttttt

SEQ ID NO: 9396 - DNA, 84 bp, Artificial
  Barcode component
  misc_feature (33)..(34): n is a, c, g, or t
  misc_feature (43)..(44): n is a, c, g, or t
  misc_feature (53)..(54): n is a, c, g, or t
tttttttaagcagtggtatcaacgcagagtacnntagacgacnnactacaggnntttttttttttttttttttttttttttttt

SEQ ID NO: 9397 - DNA, 84 bp, Artificial
  Barcode component
  misc_feature (33)..(34): n is a, c, g, or t
  misc_feature (43)..(44): n is a, c, g, or t
  misc_feature (53)..(54): n is a, c, g, or t
tttttttaagcagtggtatcaacgcagagtacnntagacgacnntacaggtcnntttttttttttttttttttttttttttttt

SEQ ID NO: 9398 - DNA, 84 bp, Artificial
  Barcode component
  misc_feature (33)..(34): n is a, c, g, or t
  misc_feature (43)..(44): n is a, c, g, or t
  misc_feature (53)..(54): n is a, c, g, or t
tttttttaagcagtggtatcaacgcagagtacnntagacgacnnctcacatgnntttttttttttttttttttttttttttttt

SEQ ID NO: 9399 - DNA, 84 bp, Artificial
  Barcode component
  misc_feature (33)..(34): n is a, c, g, or t
  misc_feature (43)..(44): n is a, c, g, or t
  misc_feature (53)..(54): n is a, c, g, or t
tttttttaagcagtggtatcaacgcagagtacnntagacgacnnactaggagnntttttttttttttttttttttttttttttt

SEQ ID NO: 9400 - DNA, 84 bp, Artificial
  Barcode component
  misc_feature (33)..(34): n is a, c, g, or t
  misc_feature (43)..(44): n is a, c, g, or t
  misc_feature (53)..(54): n is a, c, g, or t
tttttttaagcagtggtatcaacgcagagtacnntagacgacnnccatagganntttttttttttttttttttttttttttttt

SEQ ID NO: 9401 - DNA, 84 bp, Artificial
  Barcode component
  misc_feature (33)..(34): n is a, c, g, or t
  misc_feature (43)..(44): n is a, c, g, or t
  misc_feature (53)..(54): n is a, c, g, or t
tttttttaagcagtggtatcaacgcagagtacnntagacgacnnggagaatcnntttttttttttttttttttttttttttttt

SEQ ID NO: 9402 - DNA, 84 bp, Artificial
  Barcode component
  misc_feature (33)..(34): n is a, c, g, or t
  misc_feature (43)..(44): n is a, c, g, or t
  misc_feature (53)..(54): n is a, c, g, or t
tttttttaagcagtggtatcaacgcagagtacnntagacgacnngccaagaanntttttttttttttttttttttttttttttt

SEQ ID NO: 9403 - DNA, 84 bp, Artificial
  Barcode component
  misc_feature (33)..(34): n is a, c, g, or t
  misc_feature (43)..(44): n is a, c, g, or t
  misc_feature (53)..(54): n is a, c, g, or t
tttttttaagcagtggtatcaacgcagagtacnntagacgacnnaaggcaagnntttttttttttttttttttttttttttttt

SEQ ID NO: 9404 - DNA, 84 bp, Artificial
  Barcode component
  misc_feature (33)..(34): n is a, c, g, or t
  misc_feature (43)..(44): n is a, c, g, or t
  misc_feature (53)..(54): n is a, c, g, or t
tttttttaagcagtggtatcaacgcagagtacnntagacgacnnaatgtcgcnntttttttttttttttttttttttttttttt

SEQ ID NO: 9405 - DNA, 84 bp, Artificial
  Barcode component
  misc_feature (33)..(34): n is a, c, g, or t
  misc_feature (43)..(44): n is a, c, g, or t
  misc_feature (53)..(54): n is a, c, g, or t
tttttttaagcagtggtatcaacgcagagtacnntagacgacnnatggaaccnntttttttttttttttttttttttttttttt

SEQ ID NO: 9406 - DNA, 84 bp, Artificial
  Barcode component
  misc_feature (33)..(34): n is a, c, g, or t
  misc_feature (43)..(44): n is a, c, g, or t
  misc_feature (53)..(54): n is a, c, g, or t
tttttttaagcagtggtatcaacgcagagtacnntagacgacnnagaggcatnntttttttttttttttttttttttttttttt

SEQ ID NO: 9407 - DNA, 84 bp, Artificial
  Barcode component
  misc_feature (33)..(34): n is a, c, g, or t
  misc_feature (43)..(44): n is a, c, g, or t
  misc_feature (53)..(54): n is a, c, g, or t
tttttttaagcagtggtatcaacgcagagtacnntagacgacnntgcatagcnntttttttttttttttttttttttttttttt

SEQ ID NO: 9408 - DNA, 84 bp, Artificial
  Barcode component
  misc_feature (33)..(34): n is a, c, g, or t
  misc_feature (43)..(44): n is a, c, g, or t
  misc_feature (53)..(54): n is a, c, g, or t
tttttttaagcagtggtatcaacgcagagtacnntagacgacnnctaacgganntttttttttttttttttttttttttttttt

SEQ ID NO: 9409 - DNA, 84 bp, Artificial
  Barcode component
  misc_feature (33)..(34): n is a, c, g, or t
  misc_feature (43)..(44): n is a, c, g, or t
  misc_feature (53)..(54): n is a, c, g, or t
tttttttaagcagtggtatcaacgcagagtacnntagacgacnntatcgaggnntttttttttttttttttttttttttttttt

SEQ ID NO: 9410 - DNA, 84 bp, Artificial
  Barcode component
  misc_feature (33)..(34): n is a, c, g, or t
  misc_feature (43)..(44): n is a, c, g, or t
  misc_feature (53)..(54): n is a, c, g, or t
tttttttaagcagtggtatcaacgcagagtacnntagacgacnncatagcctnntttttttttttttttttttttttttttttt

SEQ ID NO: 9411 - DNA, 84 bp, Artificial
  Barcode component
  misc_feature (33)..(34): n is a, c, g, or t
  misc_feature (43)..(44): n is a, c, g, or t
  misc_feature (53)..(54): n is a, c, g, or t
tttttttaagcagtggtatcaacgcagagtacnntagacgacnnatcgagacnntttttttttttttttttttttttttttttt

SEQ ID NO: 9412 - DNA, 84 bp, Artificial
  Barcode component
  misc_feature (33)..(34): n is a, c, g, or t
  misc_feature (43)..(44): n is a, c, g, or t
  misc_feature (53)..(54): n is a, c, g, or t
tttttttaagcagtggtatcaacgcagagtacnntagacgacnnggaagagtnntttttttttttttttttttttttttttttt

SEQ ID NO: 9413 - DNA, 84 bp, Artificial
  Barcode component
  misc_feature (33)..(34): n is a, c, g, or t
  misc_feature (43)..(44): n is a, c, g, or t
  misc_feature (53)..(54): n is a, c, g, or t
tttttttaagcagtggtatcaacgcagagtacnntagacgacnnccaagtagnntttttttttttttttttttttttttttttt

SEQ ID NO: 9414 - DNA, 84 bp, Artificial
  Barcode component
  misc_feature (33)..(34): n is a, c, g, or t
  misc_feature (43)..(44): n is a, c, g, or t
  misc_feature (53)..(54): n is a, c, g, or t
tttttttaagcagtggtatcaacgcagagtacnntagacgacnnctgaacagnntttttttttttttttttttttttttttttt

SEQ ID NO: 9415 - DNA, 84 bp, Artificial
  Barcode component
  misc_feature (33)..(34): n is a, c, g, or t
  misc_feature (43)..(44): n is a, c, g, or t
  misc_feature (53)..(54): n is a, c, g, or t
tttttttaagcagtggtatcaacgcagagtacnntagacgacnngtaggttcnntttttttttttttttttttttttttttttt

SEQ ID NO: 9416 - DNA, 84 bp, Artificial
  Barcode component
  misc_feature (33)..(34): n is a, c, g, or t
  misc_feature (43)..(44): n is a, c, g, or t
  misc_feature (53)..(54): n is a, c, g, or t
tttttttaagcagtggtatcaacgcagagtacnntagacgacnngtatggacnntttttttttttttttttttttttttttttt

SEQ ID NO: 9417 - DNA, 84 bp, Artificial
  Barcode component
  misc_feature (33)..(34): n is a, c, g, or t
  misc_feature (43)..(44): n is a, c, g, or t
  misc_feature (53)..(54): n is a, c, g, or t
tttttttaagcagtggtatcaacgcagagtacnntagacgacnntcgcaacanntttttttttttttttttttttttttttttt

SEQ ID NO: 9418 - DNA, 84 bp, Artificial
  Barcode component
  misc_feature (33)..(34): n is a, c, g, or t
  misc_feature (43)..(44): n is a, c, g, or t
  misc_feature (53)..(54): n is a, c, g, or t
tttttttaagcagtggtatcaacgcagagtacnntagacgacnnccgctaatnntttttttttttttttttttttttttttttt

SEQ ID NO: 9419 - DNA, 84 bp, Artificial
  Barcode component
  misc_feature (33)..(34): n is a, c, g, or t
  misc_feature (43)..(44): n is a, c, g, or t
  misc_feature (53)..(54): n is a, c, g, or t
tttttttaagcagtggtatcaacgcagagtacnntagacgacnngattcgcanntttttttttttttttttttttttttttttt

SEQ ID NO: 9420 - DNA, 84 bp, Artificial
  Barcode component
  misc_feature (33)..(34): n is a, c, g, or t
  misc_feature (43)..(44): n is a, c, g, or t
  misc_feature (53)..(54): n is a, c, g, or t
tttttttaagcagtggtatcaacgcagagtacnntagacgacnncgatggaanntttttttttttttttttttttttttttttt

SEQ ID NO: 9421 - DNA, 84 bp, Artificial
  Barcode component
  misc_feature (33)..(34): n is a, c, g, or t
  misc_feature (43)..(44): n is a, c, g, or t
  misc_feature (53)..(54): n is a, c, g, or t
tttttttaagcagtggtatcaacgcagagtacnntagacgacnnagcaagganntttttttttttttttttttttttttttttt

SEQ ID NO: 9422 - DNA, 84 bp, Artificial
  Barcode component
  misc_feature (33)..(34): n is a, c, g, or t
  misc_feature (43)..(44): n is a, c, g, or t
  misc_feature (53)..(54): n is a, c, g, or t
tttttttaagcagtggtatcaacgcagagtacnntagacgacnncgtagcaanntttttttttttttttttttttttttttttt

SEQ ID NO: 9423 - DNA, 84 bp, Artificial
  Barcode component
  misc_feature (33)..(34): n is a, c, g, or t
  misc_feature (43)..(44): n is a, c, g, or t
  misc_feature (53)..(54): n is a, c, g, or t
tttttttaagcagtggtatcaacgcagagtacnntagacgacnntggcagtanntttttttttttttttttttttttttttttt

SEQ ID NO: 9424 - DNA, 84 bp, Artificial
  Barcode component
  misc_feature (33)..(34): n is a, c, g, or t
  misc_feature (43)..(44): n is a, c, g, or t
  misc_feature (53)..(54): n is a, c, g, or t
tttttttaagcagtggtatcaacgcagagtacnntagacgacnncggtagttnntttttttttttttttttttttttttttttt

SEQ ID NO: 9425 - DNA, 84 bp, Artificial
  Barcode component
  misc_feature (33)..(34): n is a, c, g, or t
  misc_feature (43)..(44): n is a, c, g, or t
  misc_feature (53)..(54): n is a, c, g, or t
tttttttaagcagtggtatcaacgcagagtacnntagacgacnntgacttcgnntttttttttttttttttttttttttttttt

SEQ ID NO: 9426 - DNA, 84 bp, Artificial
  Barcode component
  misc_feature (33)..(34): n is a, c, g, or t
  misc_feature (43)..(44): n is a, c, g, or t
  misc_feature (53)..(54): n is a, c, g, or t
tttttttaagcagtggtatcaacgcagagtacnntagacgacnngagtgcaanntttttttttttttttttttttttttttttt

SEQ ID NO: 9427 - DNA, 84 bp, Artificial
  Barcode component
  misc_feature (33)..(34): n is a, c, g, or t
  misc_feature (43)..(44): n is a, c, g, or t
  misc_feature (53)..(54): n is a, c, g, or t
tttttttaagcagtggtatcaacgcagagtacnntagacgacnnacggtaacnntttttttttttttttttttttttttttttt

SEQ ID NO: 9428 - DNA, 84 bp, Artificial
  Barcode component
  misc_feature (33)..(34): n is a, c, g, or t
  misc_feature (43)..(44): n is a, c, g, or t
  misc_feature (53)..(54): n is a, c, g, or t
tttttttaagcagtggtatcaacgcagagtacnntagacgacnnaagtggtgnntttttttttttttttttttttttttttttt

SEQ ID NO: 9429 - DNA, 84 bp, Artificial
  Barcode component
  misc_feature (33)..(34): n is a, c, g, or t
  misc_feature (43)..(44): n is a, c, g, or t
  misc_feature (53)..(54): n is a, c, g, or t
tttttttaagcagtggtatcaacgcagagtacnntagacgacnnggagacaanntttttttttttttttttttttttttttttt

SEQ ID NO: 9430 - DNA, 84 bp, Artificial
  Barcode component
  misc_feature (33)..(34): n is a, c, g, or t
  misc_feature (43)..(44): n is a, c, g, or t
  misc_feature (53)..(54): n is a, c, g, or t
tttttttaagcagtggtatcaacgcagagtacnntagacgacnntcaaggacnntttttttttttttttttttttttttttttt

SEQ ID NO: 9431 - DNA, 84 bp, Artificial
  Barcode component
  misc_feature (33)..(34): n is a, c, g, or t
  misc_feature (43)..(44): n is a, c, g, or t
  misc_feature (53)..(54): n is a, c, g, or t
tttttttaagcagtggtatcaacgcagagtacnntagacgacnnaagagagcnntttttttttttttttttttttttttttttt

SEQ ID NO: 9432 - DNA, 84 bp, Artificial
  Barcode component
  misc_feature (33)..(34): n is a, c, g, or t
  misc_feature (43)..(44): n is a, c, g, or t
  misc_feature (53)..(54): n is a, c, g, or t
tttttttaagcagtggtatcaacgcagagtacnntagacgacnncgagagatnntttttttttttttttttttttttttttttt

SEQ ID NO: 9433 - DNA, 84 bp, Artificial
  Barcode component
  misc_feature (33)..(34): n is a, c, g, or t
  misc_feature (43)..(44): n is a, c, g, or t
  misc_feature (53)..(54): n is a, c, g, or t
tttttttaagcagtggtatcaacgcagagtacnntagacgacnnacagatggnntttttttttttttttttttttttttttttt

SEQ ID NO: 9434 - DNA, 84 bp, Artificial
  Barcode component
  misc_feature (33)..(34): n is a, c, g, or t
  misc_feature (43)..(44): n is a, c, g, or t
  misc_feature (53)..(54): n is a, c, g, or t
tttttttaagcagtggtatcaacgcagagtacnntagacgacnnaggagtcanntttttttttttttttttttttttttttttt

SEQ ID NO: 9435 - DNA, 84 bp, Artificial
  Barcode component
  misc_feature (33)..(34): n is a, c, g, or t
  misc_feature (43)..(44): n is a, c, g, or t
  misc_feature (53)..(54): n is a, c, g, or t
tttttttaagcagtggtatcaacgcagagtacnntagacgacnncgtgttacnntttttttttttttttttttttttttttttt

SEQ ID NO: 9436 - DNA, 84 bp, Artificial
  Barcode component
  misc_feature (33)..(34): n is a, c, g, or t
  misc_feature (43)..(44): n is a, c, g, or t
  misc_feature (53)..(54): n is a, c, g, or t
tttttttaagcagtggtatcaacgcagagtacnntagacgacnntagtgtgcnntttttttttttttttttttttttttttttt

SEQ ID NO: 9437 - DNA, 84 bp, Artificial
  Barcode component
  misc_feature (33)..(34): n is a, c, g, or t
  misc_feature (43)..(44): n is a, c, g, or t
  misc_feature (53)..(54): n is a, c, g, or t
tttttttaagcagtggtatcaacgcagagtacnntagacgacnnctcatgacnntttttttttttttttttttttttttttttt

SEQ ID NO: 9438 - DNA, 84 bp, Artificial
  Barcode component
  misc_feature (33)..(34): n is a, c, g, or t
  misc_feature (43)..(44): n is a, c, g, or t
  misc_feature (53)..(54): n is a, c, g, or t
tttttttaagcagtggtatcaacgcagagtacnntagacgacnngtatccagnntttttttttttttttttttttttttttttt

SEQ ID NO: 9439 - DNA, 84 bp, Artificial
  Barcode component
  misc_feature (33)..(34): n is a, c, g, or t
  misc_feature (43)..(44): n is a, c, g, or t
  misc_feature (53)..(54): n is a, c, g, or t
tttttttaagcagtggtatcaacgcagagtacnntagacgacnnacgcctatnntttttttttttttttttttttttttttttt

SEQ ID NO: 9440 - DNA, 84 bp, Artificial
  Barcode component
  misc_feature (33)..(34): n is a, c, g, or t
  misc_feature (43)..(44): n is a, c, g, or t
  misc_feature (53)..(54): n is a, c, g, or t
tttttttaagcagtggtatcaacgcagagtacnntagacgacnnaacgacctnntttttttttttttttttttttttttttttt

SEQ ID NO: 9441 - DNA, 84 bp, Artificial
  Barcode component
  misc_feature (33)..(34): n is a, c, g, or t
  misc_feature (43)..(44): n is a, c, g, or t
  misc_feature (53)..(54): n is a, c, g, or t
tttttttaagcagtggtatcaacgcagagtacnntagacgacnnatcaggctnntttttttttttttttttttttttttttttt

SEQ ID NO: 9442 - DNA, 84 bp, Artificial
  Barcode component
  misc_feature (33)..(34): n is a, c, g, or t
  misc_feature (43)..(44): n is a, c, g, or t
  misc_feature (53)..(54): n is a, c, g, or t
tttttttaagcagtggtatcaacgcagagtacnntagacgacnncaagttcgnntttttttttttttttttttttttttttttt

SEQ ID NO: 9443 - DNA, 84 bp, Artificial
  Barcode component
  misc_feature (33)..(34): n is a, c, g, or t
  misc_feature (43)..(44): n is a, c, g, or t
  misc_feature (53)..(54): n is a, c, g, or t
tttttttaagcagtggtatcaacgcagagtacnntagacgacnntagccaganntttttttttttttttttttttttttttttt

SEQ ID NO: 9444 - DNA, 84 bp, Artificial
  Barcode component
  misc_feature (33)..(34): n is a, c, g, or t
  misc_feature (43)..(44): n is a, c, g, or t
  misc_feature (53)..(54): n is a, c, g, or t
tttttttaagcagtggtatcaacgcagagtacnntagacgacnncaatcacgnntttttttttttttttttttttttttttttt

SEQ ID NO: 9445 - DNA, 84 bp, Artificial
  Barcode component
  misc_feature (33)..(34): n is a, c, g, or t
  misc_feature (43)..(44): n is a, c, g, or t
  misc_feature (53)..(54): n is a, c, g, or t
tttttttaagcagtggtatcaacgcagagtacnntagacgacnngcaacaagnntttttttttttttttttttttttttttttt

SEQ ID NO: 9446 - DNA, 84 bp, Artificial
  Barcode component
  misc_feature (33)..(34): n is a, c, g, or t
  misc_feature (43)..(44): n is a, c, g, or t
  misc_feature (53)..(54): n is a, c, g, or t
tttttttaagcagtggtatcaacgcagagtacnntagacgacnncacgacaanntttttttttttttttttttttttttttttt

SEQ ID NO: 9447 - DNA, 84 bp, Artificial
  Barcode component
  misc_feature (33)..(34): n is a, c, g, or t
  misc_feature (43)..(44): n is a, c, g, or t
  misc_feature (53)..(54): n is a, c, g, or t
tttttttaagcagtggtatcaacgcagagtacnntagacgacnntacggaganntttttttttttttttttttttttttttttt

SEQ ID NO: 9448 - DNA, 84 bp, Artificial
  Barcode component
  misc_feature (33)..(34): n is a, c, g, or t
  misc_feature (43)..(44): n is a, c, g, or t
  misc_feature (53)..(54): n is a, c, g, or t
tttttttaagcagtggtatcaacgcagagtacnntagacgacnncgacaaganntttttttttttttttttttttttttttttt

SEQ ID NO: 9449 - DNA, 84 bp, Artificial
  Barcode component
  misc_feature (33)..(34): n is a, c, g, or t
  misc_feature (43)..(44): n is a, c, g, or t
  misc_feature (53)..(54): n is a, c, g, or t
tttttttaagcagtggtatcaacgcagagtacnntagacgacnncgaagtganntttttttttttttttttttttttttttttt

SEQ ID NO: 9450 - DNA, 84 bp, Artificial
  Barcode component
  misc_feature (33)..(34): n is a, c, g, or t
  misc_feature (43)..(44): n is a, c, g, or t
  misc_feature (53)..(54): n is a, c, g, or t
tttttttaagcagtggtatcaacgcagagtacnntagacgacnnagctggtanntttttttttttttttttttttttttttttt

SEQ ID NO: 9451 - DNA, 84 bp, Artificial
  Barcode component
  misc_feature (33)..(34): n is a, c, g, or t
  misc_feature (43)..(44): n is a, c, g, or t
  misc_feature (53)..(54): n is a, c, g, or t
tttttttaagcagtggtatcaacgcagagtacnntagacgacnnaactaggcnntttttttttttttttttttttttttttttt

SEQ ID NO: 9452 - DNA, 84 bp, Artificial
  Barcode component
  misc_feature (33)..(34): n is a, c, g, or t
  misc_feature (43)..(44): n is a, c, g, or t
  misc_feature (53)..(54): n is a, c, g, or t
tttttttaagcagtggtatcaacgcagagtacnntagacgacnncagcaagtnntttttttttttttttttttttttttttttt

SEQ ID NO: 9453 - DNA, 84 bp, Artificial
  Barcode component
  misc_feature (33)..(34): n is a, c, g, or t
  misc_feature (43)..(44): n is a, c, g, or t
  misc_feature (53)..(54): n is a, c, g, or t
tttttttaagcagtggtatcaacgcagagtacnntagacgacnnacgaggtanntttttttttttttttttttttttttttttt

SEQ ID NO: 9454 - DNA, 84 bp, Artificial
  Barcode component
  misc_feature (33)..(34): n is a, c, g, or t
  misc_feature (43)..(44): n is a, c, g, or t
  misc_feature (53)..(54): n is a, c, g, or t
tttttttaagcagtggtatcaacgcagagtacnntagacgacnncatcttccnntttttttttttttttttttttttttttttt

SEQ ID NO: 9455 - DNA, 84 bp, Artificial
  Barcode component
  misc_feature (33)..(34): n is a, c, g, or t
  misc_feature (43)..(44): n is a, c, g, or t
  misc_feature (53)..(54): n is a, c, g, or t
tttttttaagcagtggtatcaacgcagagtacnntagacgacnncctgaatcnntttttttttttttttttttttttttttttt

SEQ ID NO: 9456 - DNA, 84 bp, Artificial
  Barcode component
  misc_feature (33)..(34): n is a, c, g, or t
  misc_feature (43)..(44): n is a, c, g, or t
  misc_feature (53)..(54): n is a, c, g, or t
tttttttaagcagtggtatcaacgcagagtacnntagacgacnntgcagactnntttttttttttttttttttttttttttttt

SEQ ID NO: 9457 - DNA, 84 bp, Artificial
  Barcode component
  misc_feature (33)..(34): n is a, c, g, or t
  misc_feature (43)..(44): n is a, c, g, or t
  misc_feature (53)..(54): n is a, c, g, or t
tttttttaagcagtggtatcaacgcagagtacnntagacgacnnagatgtggnntttttttttttttttttttttttttttttt

SEQ ID NO: 9458 - DNA, 84 bp, Artificial
  Barcode component
  misc_feature (33)..(34): n is a, c, g, or t
  misc_feature (43)..(44): n is a, c, g, or t
  misc_feature (53)..(54): n is a, c, g, or t
tttttttaagcagtggtatcaacgcagagtacnntagacgacnnagttcgacnntttttttttttttttttttttttttttttt

SEQ ID NO: 9459 - DNA, 84 bp, Artificial
  Barcode component
  misc_feature (33)..(34): n is a, c, g, or t
  misc_feature (43)..(44): n is a, c, g, or t
  misc_feature (53)..(54): n is a, c, g, or t
tttttttaagcagtggtatcaacgcagagtacnntagacgacnnacaacctcnntttttttttttttttttttttttttttttt

SEQ ID NO: 9460 - DNA, 84 bp, Artificial
  Barcode component
  misc_feature (33)..(34): n is a, c, g, or t
  misc_feature (43)..(44): n is a, c, g, or t
  misc_feature (53)..(54): n is a, c, g, or t
tttttttaagcagtggtatcaacgcagagtacnntagacgacnncatggtagnntttttttttttttttttttttttttttttt

SEQ ID NO: 9461 - DNA, 84 bp, Artificial
  Barcode component
  misc_feature (33)..(34): n is a, c, g, or t
  misc_feature (43)..(44): n is a, c, g, or t
  misc_feature (53)..(54): n is a, c, g, or t
tttttttaagcagtggtatcaacgcagagtacnntagacgacnncgtatctcnntttttttttttttttttttttttttttttt

SEQ ID NO: 9462 - DNA, 84 bp, Artificial
  Barcode component
  misc_feature (33)..(34): n is a, c, g, or t
  misc_feature (43)..(44): n is a, c, g, or t
  misc_feature (53)..(54): n is a, c, g, or t
tttttttaagcagtggtatcaacgcagagtacnntagacgacnncctagttcnntttttttttttttttttttttttttttttt

SEQ ID NO: 9463 - DNA, 84 bp, Artificial
  Barcode component
  misc_feature (33)..(34): n is a, c, g, or t
  misc_feature (43)..(44): n is a, c, g, or t
  misc_feature (53)..(54): n is a, c, g, or t
tttttttaagcagtggtatcaacgcagagtacnntagacgacnncaagagtcnntttttttttttttttttttttttttttttt
